United States Patent Application Publication US 2026/0273097 A1, published September 17, 2026 (application 19/167,950).

The application's sequence listing, which the Patent Office published only in electronic form, follows.

SEQUENCE LISTING (6437 sequences)

SEQ ID NO: 1 - protein, 743 aa, synthetic construct
MAADGYLPDWLEDNLSEGIREWWALKPGAPQPKANQQHQDNARGLVLPGYKYLGPGNGLDKGEPVNAADAAALEHDKAYDQQLKAGDNPYLKYNHADAEFQERLKEDTSFGGNLGRAVFQAKKRLLEPLGLVEEAAKTAPGKKRPVEQSPQEPDSSAGIGKSGAQPAKKRLNFGQTGDTESVPDPQPIGEPPAAPSGVGSLTMASGGGAPVADNNEGADGVGSSSGNWHCDSQWLGDRVITTSTRTWALPTYNNHLYKQISNSTSGGSSNDNAYFGYSTPWGYFDFNRFHCHFSPRDWQRLINNNWGFRPKRLNFKLFNIQVKEVTDNNGVKTIANNLTSTVQVFTDSDYQLPYVLGSAHEGCLPPFPADVFMIPQYGYLTLNDGSQAVGRSSFYCLEYFPSQMLRTGNNFQFSYEFENVPFHSSYAHSQSLDRLMNPLIDQYLYYLSKTINGSGQNQQTLKFSVAGPSNMAVQGRNYIPGPSYRQQRVSTTVTQNNNSEFAWPGASSWALNGRNSLMNPGPAMASHKEGEDRFFPLSGSLIFGKQGTGRDNVDADKVMITNEEEIKTTNPVATESYGQVATNHQSDGTLAVPFKAQAQTGWVQNQGILPGMVWQDRDVYLQGPIWAKIPHTDGNFHPSPLMGGFGMKHPPPQILIKNTPVPADPPTAFNKDKLNSFITQYSTGQVSVEIEWELQKENSKRWNPEIQYTSNYYKSNNVEFAVNTEGVYSEPRPIGTRYLTRNL

SEQ ID NO: 2 - protein, 6 aa, synthetic construct
HDSPHK

SEQ ID NO: 3 - DNA, 18 bp, synthetic construct
  source 1..18: mol_type = other DNA
cacgacagcccacacaaa

SEQ ID NO: 4 - protein, 742 aa, synthetic construct
MAADGYLPDWLEDNLSEGIREWWALKPGAPQPKANQQHQDNARGLVLPGYKYLGPGNGLDKGEPVNAADAAALEHDKAYDQQLKAGDNPYLKYNHADAEFQERLKEDTSFGGNLGRAVFQAKKRLLEPLGLVEEAAKTAPGKKRPVEQSPQEPDSSAGIGKSGAQPAKKRLNFGQTGDTESVPDPQPIGEPPAAPSGVGSLTMASGGGAPVADNNEGADGVGSSSGNWHCDSQWLGDRVITTSTRTWALPTYNNHLYKQISNSTSGGSSNDNAYFGYSTPWGYFDFNRFHCHFSPRDWQRLINNNWGFRPKRLNFKLFNIQVKEVTDNNGVKTIANNLTSTVQVFTDSDYQLPYVLGSAHEGCLPPFPADVFMIPQYGYLTLNDGSQAVGRSSFYCLEYFPSQMLRTGNNFQFSYEFENVPFHSSYAHSQSLDRLMNPLIDQYLYYLSKTENVSGSPHSKAQNQQTLKFSVAGPSNMAVQGRNYIPGPSYRQQRVSTTVTQNNNSEFAWPGASSWALNGRNSLMNPGPAMASHKEGEDRFFPLSGSLIFGKQGTGRDNVDADKVMITNEEEIKTTNPVATESYGQVATNHQSAQAQAQTGWVQNQGILPGMVWQDRDVYLQGPIWAKIPHTDGNFHPSPLMGGFGMKHPPPQILIKNTPVPADPPTAFNKDKLNSFITQYSTGQVSVEIEWELQKENSKRWNPEIQYTSNYYKSNNVEFAVNTEGVYSEPRPIGTRYLTRNL

SEQ ID NO: 5 - DNA, 2226 bp, synthetic construct
  source 1..2226: mol_type = other DNA
atggctgccgatggttatcttccagattggctcgaggacaaccttagtgaaggaattcgcgagtggtgggctttgaaacctggagcccctcaacccaaggcaaatcaacaacatcaagacaacgctcgaggtcttgtgcttccgggttacaaataccttggacccggcaacggactcgacaagggggagccggtcaacgcagcagacgcggcggccctcgagcacgacaaggcctacgaccagcagctcaaggccggagacaacccgtacctcaagtacaaccacgccgacgccgagttccaggagcggctcaaagaagatacgtcttttgggggcaacctcgggcgagcagtcttccaggccaaaaagaggcttcttgaacctcttggtctggttgaggaagcggctaagacggctcctggaaagaagaggcctgtagagcagtctcctcaggaaccggactcctccgcgggtattggcaaatcgggtgcacagcccgctaaaaagagactcaatttcggtcagactggcgacacagagtcagtcccagaccctcaaccaatcggagaacctcccgcagccccctcaggtgtgggatctcttacaatggcttcaggtggtggcgcaccagtggcagacaataacgaaggtgccgatggagtgggtagttcctcgggaaattggcattgcgattcccaatggctgggggacagagtcatcaccaccagcacccgaacctgggccctgcccacctacaacaatcacctctacaagcaaatctccaacagcacatctggaggatcttcaaatgacaacgcctacttcggctacagcaccccctgggggtattttgacttcaacagattccactgccacttctcaccacgtgactggcagcgactcatcaacaacaactggggattccggcctaagcgactcaacttcaagctcttcaacattcaggtcaaagaggttacggacaacaatggagtcaagaccatcgccaataaccttaccagcacggtccaggtcttcacggactcagactatcagctcccgtacgtgctcgggtcggctcacgagggctgcctcccgccgttcccagcggacgttttcatgattcctcagtacgggtatctgacgcttaatgatggaagccaggccgtgggtcgttcgtccttttactgcctggaatatttcccgtcgcaaatgctaagaacgggtaacaacttccagttcagctacgagtttgagaacgtacctttccatagcagctacgctcacagccaaagcctggaccgactaatgaatccactcatcgaccaatacttgtactatctctctaagactgagaatgtgagcgggagccctcatagcaaggctcagaatcagcagactctaaaattcagtgtggccggacccagcaacatggctgtccagggaagaaactacatacctggacccagctaccgacaacaacgtgtctcaaccactgtgactcaaaacaacaacagcgaatttgcttggcctggagcttcttcttgggctctcaatggacgtaatagcttgatgaatcctggacctgctatggccagccacaaagaaggagaggaccgtttctttcctttgtctggatctttaatttttggcaaacaaggaactggaagagacaacgtggatgcggacaaagtcatgataaccaacgaagaagaaattaaaactactaacccggtagcaacggagtcctatggacaagtggccacaaaccaccagagtgcccaagcacaggcgcagaccggctgggttcaaaaccaaggaatacttccgggtatggtttggcaggacagagatgtgtacctgcaaggacccatttgggccaaaattcctcacacggacggcaactttcacccttctccgctgatgggagggtttggaatgaagcacccgcctcctcagatcctcatcaaaaacacacctgtacctgcggatcctccaacggccttcaacaaggacaagctgaactctttcatcacccagtattctactggccaagtcagcgtggagatcgagtgggagctgcagaaggaaaacagcaagcgctggaacccggagatccagtacacttccaactattacaagtctaataatgttgaatttgctgttaatactgaaggtgtatatagtgaaccccgccccattggcaccagatacctgactcgtaatctg

SEQ ID NO: 6-10 - skipped (5 entries)

SEQ ID NO: 11 - protein, 736 aa, synthetic construct
MAADGYLPDWLEDNLSEGIREWWALKPGAPQPKANQQHQDNARGLVLPGYKYLGPGNGLDKGEPVNAADAAALEHDKAYDQQLKAGDNPYLKYNHADAEFQERLKEDTSFGGNLGRAVFQAKKRLLEPLGLVEEAAKTAPGKKRPVEQSPQEPDSSAGIGKSGAQPAKKRLNFGQTGDTESVPDPQPIGEPPAAPSGVGSLTMASGGGAPVADNNEGADGVGSSSGNWHCDSQWLGDRVITTSTRTWALPTYNNHLYKQISNSTSGGSSNDNAYFGYSTPWGYFDFNRFHCHFSPRDWQRLINNNWGFRPKRLNFKLFNIQVKEVTDNNGVKTIANNLTSTVQVFTDSDYQLPYVLGSAHEGCLPPFPADVFMIPQYGYLTLNDGSQAVGRSSFYCLEYFPSQMLRTGNNFQFSYEFENVPFHSSYAHSQSLDRLMNPLIDQYLYYLSRTINGSGQNQQTLKFSVAGPSNMAVQGRNYIPGPSYRQQRVSTTVTQNNNSEFAWPGASSWALNGRNSLMNPGPAMASHKEGEDRFFPLSGSLIFGKQGTGRDNVDADKVMITNEEEIKTTNPVATESYGQVATNHQSAQAQAQTGWVQNQGILPGMVWQDRDVYLQGPIWAKIPHTDGNFHPSPLMGGFGMKHPPPQILIKNTPVPADPPTAFNKDKLNSFITQYSTGQVSVEIEWELQKENSKRWNPEIQYTSNYYKSNNVEFAVNTEGVYSEPRPIGTRYLTRNL

SEQ ID NO: 12 - DNA, 2226 bp, synthetic construct
  source 1..2226: mol_type = other DNA
atggctgccgatggttatcttccagattggctcgaggacaaccttagtgaaggaattcgcgagtggtgggctttgaaacctggagcccctcaacccaaggcaaatcaacaacatcaagacaacgctcgaggtcttgtgcttccgggttacaaataccttggacccggcaacggactcgacaagggggagccggtcaacgcagcagacgcggcggccctcgagcacgacaaggcctacgaccagcagctcaaggccggagacaacccgtacctcaagtacaaccacgccgacgccgagttccaggagcggctcaaagaagatacgtcttttgggggcaacctcgggcgagcagtcttccaggccaaaaagaggcttcttgaacctcttggtctggttgaggaagcggctaagacggctcctggaaagaagaggcctgtagagcagtctcctcaggaaccggactcctccgcgggtattggcaaatcgggtgcacagcccgctaaaaagagactcaatttcggtcagactggcgacacagagtcagtcccagaccctcaaccaatcggagaacctcccgcagccccctcaggtgtgggatctcttacaatggcttcaggtggtggcgcaccagtggcagacaataacgaaggtgccgatggagtgggtagttcctcgggaaattggcattgcgattcccaatggctgggggacagagtcatcaccaccagcacccgaacctgggccctgcccacctacaacaatcacctctacaagcaaatctccaacagcacatctggaggatcttcaaatgacaacgcctacttcggctacagcaccccctgggggtattttgacttcaacagattccactgccacttctcaccacgtgactggcagcgactcatcaacaacaactggggattccggcctaagcgactcaacttcaagctcttcaacattcaggtcaaagaggttacggacaacaatggagtcaagaccatcgccaataaccttaccagcacggtccaggtcttcacggactcagactatcagctcccgtacgtgctcgggtcggctcacgagggctgcctcccgccgttcccagcggacgttttcatgattcctcagtacgggtatctgacgcttaatgatggaagccaggccgtgggtcgttcgtccttttactgcctggaatatttcccgtcgcaaatgctaagaacgggtaacaacttccagttcagctacgagtttgagaacgtacctttccatagcagctacgctcacagccaaagcctggaccgactaatgaatccactcatcgatcagtatctgtattacttgagtaagacggagcgtgtgtctggttctccgcattctaaggcgcagaatcagcagacgttgaagttttcggtagctggtcctagcaacatggctgtccagggaagaaactacatacctggacccagctaccgacaacaacgtgtctcaaccactgtgactcaaaacaacaacagcgaatttgcttggcctggagcttcttcttgggctctcaatggacgtaatagcttgatgaatcctggacctgctatggccagccacaaagaaggagaggaccgtttctttcctttgtctggatctttaatttttggcaaacaaggaactggaagagacaacgtggatgcggacaaagtcatgataaccaacgaagaagaaattaaaactactaacccggtagcaacggagtcctatggacaagtggccacaaaccaccagagtgcccaagcacaggcgcagaccggctgggttcaaaaccaaggaatacttccgggtatggtttggcaggacagagatgtgtacctgcaaggacccatttgggccaaaattcctcacacggacggcaactttcacccttctccgctgatgggagggtttggaatgaagcacccgcctcctcagatcctcatcaaaaacacacctgtacctgcggatcctccaacggccttcaacaaggacaagctgaactctttcatcacccagtattctactggccaagtcagcgtggagatcgagtgggagctgcagaaggaaaacagcaagcgctggaacccggagatccagtacacttccaactattacaagtctaataatgttgaatttgctgttaatactgaaggtgtatatagtgaaccccgccccattggcacgcggtatttaacgaggaactta

SEQ ID NO: 13 - DNA, 2226 bp, synthetic construct
  source 1..2226: mol_type = other DNA
atggctgccgatggttatcttccagattggctcgaggacaaccttagtgaaggaattcgcgagtggtgggctttgaaacctggagcccctcaacccaaggcaaatcaacaacatcaagacaacgctcgaggtcttgtgcttccgggttacaaataccttggacccggcaacggactcgacaagggggagccggtcaacgcagcagacgcggcggccctcgagcacgacaaggcctacgaccagcagctcaaggccggagacaacccgtacctcaagtacaaccacgccgacgccgagttccaggagcggctcaaagaagatacgtcttttgggggcaacctcgggcgagcagtcttccaggccaaaaagaggcttcttgaacctcttggtctggttgaggaagcggctaagacggctcctggaaagaagaggcctgtagagcagtctcctcaggaaccggactcctccgcgggtattggcaaatcgggtgcacagcccgctaaaaagagactcaatttcggtcagactggcgacacagagtcagtcccagaccctcaaccaatcggagaacctcccgcagccccctcaggtgtgggatctcttacaatggcttcaggtggtggcgcaccagtggcagacaataacgaaggtgccgatggagtgggtagttcctcgggaaattggcattgcgattcccaatggctgggggacagagtcatcaccaccagcacccgaacctgggccctgcccacctacaacaatcacctctacaagcaaatctccaacagcacatctggaggatcttcaaatgacaacgcctacttcggctacagcaccccctgggggtattttgacttcaacagattccactgccacttctcaccacgtgactggcagcgactcatcaacaacaactggggattccggcctaagcgactcaacttcaagctcttcaacattcaggtcaaagaggttacggacaacaatggagtcaagaccatcgccaataaccttaccagcacggtccaggtcttcacggactcagactatcagctcccgtacgtgctcgggtcggctcacgagggctgcctcccgccgttcccagcggacgttttcatgattcctcagtacgggtatctgacgcttaatgatggaagccaggccgtgggtcgttcgtccttttactgcctggaatatttcccgtcgcaaatgctaagaacgggtaacaacttccagttcagctacgagtttgagaacgtacctttccatagcagctacgctcacagccaaagcctggaccgactaatgaatccactcatcgatcagtatctgtattacttgagtaaggcggagattggtcatgattctccgcataagtctggtcagaatcagcagacgttgaagttttcggtagctggtcctagcaacatggctgtccagggaagaaactacatacctggacccagctaccgacaacaacgtgtctcaaccactgtgactcaaaacaacaacagcgaatttgcttggcctggagcttcttcttgggctctcaatggacgtaatagcttgatgaatcctggacctgctatggccagccacaaagaaggagaggaccgtttctttcctttgtctggatctttaatttttggcaaacaaggaactggaagagacaacgtggatgcggacaaagtcatgataaccaacgaagaagaaattaaaactactaacccggtagcaacggagtcctatggacaagtggccacaaaccaccagagtgcccaagcacaggcgcagaccggctgggttcaaaaccaaggaatacttccgggtatggtttggcaggacagagatgtgtacctgcaaggacccatttgggccaaaattcctcacacggacggcaactttcacccttctccgctgatgggagggtttggaatgaagcacccgcctcctcagatcctcatcaaaaacacacctgtacctgcggatcctccaacggccttcaacaaggacaagctgaactctttaatcacccagtattctactggccaagtcagcgtggagatcgagtgggagctgcagaaggaaaacagcaagcgctggaacccggagatccagtacacttccaactattacaagtctaataatgttgaatttgctgttaatactgaaggtgtatatagtgaaccccgccccattggcacgcggtatttaacgaggaactta

SEQ ID NO: 14 - DNA, 2226 bp, synthetic construct
  source 1..2226: mol_type = other DNA
atggctgccgatggttatcttccagattggctcgaggacaaccttagtgaaggaattcgcgagtggtgggctttgaaacctggagcccctcaacccaaggcaaatcaacaacatcaagacaacgctcgaggtcttgtgcttccgggttacaaataccttggacccggcaacggactcgacaagggggagccggtcaacgcagcagacgcggcggccctcgagcacgacaaggcctacgaccagcagctcaaggccggagacaacccgtacctcaagtacaaccacgccgacgccgagttccaggagcggctcaaagaagatacgtcttttgggggcaacctcgggcgagcagtcttccaggccaaaaagaggcttcttgaacctcttggtctggttgaggaagcggctaagacggctcctggaaagaagaggcctgtagagcagtctcctcaggaaccggactcctccgcgggtattggcaaatcgggtgcacagcccgctaaaaagagactcaatttcggtcagactggcgacacagagtcagtcccagaccctcaaccaatcggagaacctcccgcagccccctcaggtgtgggatctcttacaatggcttcaggtggtggcgcaccagtggcagacaataacgaaggtgccgatggagtgggtagttcctcgggaaattggcattgcgattcccaatggctgggggacagagtcatcaccaccagcacccgaacctgggccctgcccacctacaacaatcacctctacaagcaaatctccaacagcacatctggaggatcttcaaatgacaacgcctacttcggctacagcaccccctgggggtattttgacttcaacagattccactgccacttctcaccacgtgactggcagcgactcatcaacaacaactggggattccggcctaagcgactcaacttcaagctcttcaacattcaggtcaaagaggttacggacaacaatggagtcaagaccatcgccaataaccttaccagcacggtccaggtcttcacggactcagactatcagctcccgtacgtgctcgggtcggctcacgagggctgcctcccgccgttcccagcggacgttttcatgattcctcagtacgggtatctgacgcttaatgatggaagccaggccgtgggtcgttcgtccttttactgcctggaatatttcccgtcgcaaatgctaagaacgggtaacaacttccagttcagctacgagtttgagaacgtacctttccatagcagctacgctcacagccaaagcctggaccgactaatgaatccactcatcgatcagtatctgtattacttgagtaagacgattattggttctggttctccgcattctaaggcgcagaatcgtcatacgttgaagttttcggtagctggtcctagcaacatggctgtccagggaagaaactacatacctggacccagctaccgacaacaacgtgtctcaaccactgtgactcaaaacaacaacagcgaatttgcttggcctggagcttcttcttgggctctcaatggacgtaatagcttgatgaatcctggacctgctatggccagccacaaagaaggagaggaccgtttctttcctttgtctggatctttaatttttggcaaacaaggaactggaagagacaacgtggatgcggacaaagtcatgataaccaacgaagaagaaattaaaactactaacccggtagcaacggagtcctatggacaagtggccacaaaccaccagagtgcccaagcacaggcgcagaccggctgggttcaaaaccaaggaatacttccgggtatggtttggcaggacagagatgtgtacctgcaaggacccatttgggccaaaattcctcacacggacggcaactttcacccttctccgctgatgggagggtttggaatgaagcacccgcctcctcagatcctcatcaaaaacacacctgtacctgcggatcctccaacggccttcaacaaggacaagctgaactctttcatcacccagtattctactggccaagtcagcgtggagatcgagtgggagctgcagaaggaaaacagcaagcgctggaacccggagatccagtacacttccaactattacaagtctaataatgttgaatttgctgttaatactgaaggtgtatatagtgaaccccgccccattggcacgcggtatttaacgaggaactta

SEQ ID NO: 15 - DNA, 2226 bp, synthetic construct
  source 1..2226: mol_type = other DNA
atggctgccgatggttatcttccagattggctcgaggacaaccttagtgaaggaattcgcgagtggtgggctttgaaacctggagcccctcaacccaaggcaaatcaacaacatcaagacaacgctcgaggtcttgtgcttccgggttacaaataccttggacccggcaacggactcgacaagggggagccggtcaacgcagcagacgcggcggccctcgagcacgacaaggcctacgaccagcagctcaaggccggagacaacccgtacctcaagtacaaccacgccgacgccgagttccaggagcggctcaaagaagatacgtcttttgggggcaacctcgggcgagcagtcttccaggccaaaaagaggcttcttgaacctcttggtctggttgaggaagcggctaagacggctcctggaaagaagaggcctgtagagcagtctcctcaggaaccggactcctccgcgggtattggcaaatcgggtgcacagcccgctaaaaagagactcaatttcggtcagactggcgacacagagtcagtcccagaccctcaaccaatcggagaacctcccgcagccccctcaggtgtgggatctcttacaatggcttcaggtggtggcgcaccagtggcagacaataacgaaggtgccgatggagtgggtagttcctcgggaaattggcattgcgattcccaatggctgggggacagagtcatcaccaccagcacccgaacctgggccctgcccacctacaacaatcacctctacaagcaaatctccaacagcacatctggaggatcttcaaatgacaacgcctacttcggctacagcaccccctgggggtattttgacttcaacagattccactgccacttctcaccacgtgactggcagcgactcatcaacaacaactggggattccggcctaagcgactcaacttcaagctcttcaacattcaggtcaaagaggttacggacaacaatggagtcaagaccatcgccaataaccttaccagcacggtccaggtcttcacggactcagactatcagctcccgtacgtgctcgggtcggctcacgagggctgcctcccgccgttcccagcggacgttttcatgattcctcagtacgggtatctgacgcttaatgatggaagccaggccgtgggtcgttcgtccttttactgcctggaatatttcccgtcgcaaatgctaagaacgggtaacaacttccagttcagctacgagtttgagaacgtacctttccatagcagctacgctcacagccaaagcctggaccgactaatgaatccactcatcgatcagtatctgtattacttgagtaagacggagaagatgtctggttctccgcattctaaggcgcagaatcagcagacgttgaagttttcggtagctggtcctagcaacatggctgtccagggaagaaactacatacctggacccagctaccgacaacaacgtgtctcaaccactgtgactcaaaacaacaacagcgaatttgcttggcctggagcttcttcttgggctctcaatggacgtaatagcttgatgaatcctggacctgctatggccagccacaaagaaggagaggaccgtttctttcctttgtctggatctttaatttttggcaaacaaggaactggaagagacaacgtggatgcggacaaagtcatgataaccaacgaagaagaaattaaaactactaacccggtagcaacggagtcctatggacaagtggccacaaaccaccagagtgcccaagcacaggcgcagaccggctgggttcaaaaccaaggaatacttccgggtatggtttggcaggacagagatgtgtacctgcaaggacccatttgggccaaaattcctcacacggacggcaactttcacccttctccgctgatgggagggtttggaatgaagcacccgcctcctcagatcctcatcaaaaacacacctgtacctgcggatcctccaacggccttcaacaaggacaagctgaactctttcatcacccagtattctactggccaagtcagcgtggagatcgagtgggagctgcagaaggaaaacagcaagcgctggaacccggagatccagtacacttccaactattacaagtctaataatgttgaatttgctgttaatactgaaggtgtatatagtgaaccccgccccattggcacgcggtatttaacgaggaactta

SEQ ID NO: 16 - DNA, 2226 bp, synthetic construct
  source 1..2226: mol_type = other DNA
atggctgccgatggttatcttccagattggctcgaggacaaccttagtgaaggaattcgcgagtggtgggctttgaaacctggagcccctcaacccaaggcaaatcaacaacatcaagacaacgctcgaggtcttgtgcttccgggttacaaataccttggacccggcaacggactcgacaagggggagccggtcaacgcagcagacgcggcggccctcgagcacgacaaggcctacgaccagcagctcaaggccggagacaacccgtacctcaagtacaaccacgccgacgccgagttccaggagcggctcaaagaagatacgtcttttgggggcaacctcgggcgagcagtcttccaggccaaaaagaggcttcttgaacctcttggtctggttgaggaagcggctaagacggctcctggaaagaagaggcctgtagagcagtctcctcaggaaccggactcctccgcgggtattggcaaatcgggtgcacagcccgctaaaaagagactcaatttcggtcagactggcgacacagagtcagtcccagaccctcaaccaatcggagaacctcccgcagccccctcaggtgtgggatctcttacaatggcttcaggtggtggcgcaccagtggcagacaataacgaaggtgccgatggagtgggtagttcctcgggaaattggcattgcgattcccaatggctgggggacagagtcatcaccaccagcacccgaacctgggccctgcccacctacaacaatcacctctacaagcaaatctccaacagcacatctggaggatcttcaaatgacaacgcctacttcggctacagcaccccctgggggtattttgacttcaacagattccactgccacttctcaccacgtgactggcagcgactcatcaacaacaactggggattccggcctaagcgactcaacttcaagctcttcaacattcaggtcaaagaggttacggacaacaatggagtcaagaccatcgccaataaccttaccagcacggtccaggtcttcacggactcagactatcagctcccgtacgtgctcgggtcggctcacgagggctgcctcccgccgttcccagcggacgttttcatgattcctcagtacgggtatctgacgcttaatgatggaagccaggccgtgggtcgttcgtccttttactgcctggaatatttcccgtcgcaaatgctaagaacgggtaacaacttccagttcagctacgagtttgagaacgtacctttccatagcagctacgctcacagccaaagcctggaccgactaatgaatccactcatcgatcagtatctgtattacttgagtaaggagattaatggtcgtggttctccgcattctaaggcgcagaatcagcagacgttgaagttttcggtagctggtcctagcaacatggctgtccagggaagaaactacatacctggacccagctaccgacaacaacgtgtctcaaccactgtgactcaaaacaacaacagcgaatttgcttggcctggagcttcttcttgggctctcaatggacgtaatagcttgatgaatcctggacctgctatggccagccacaaagaaggagaggaccgtttctttcctttgtctggatctttaatttttggcaaacaaggaactggaagagacaacgtggatgcggacaaagtcatgataaccaacgaagaagaaattaaaactactaacccggtagcaacggagtcctatggacaagtggccacaaaccaccagagtgcccaagcacaggcgcagaccggctgggttcaaaaccaaggaatacttccgggtatggtttggcaggacagagatgtgtacctgcaaggacccatttgggccaaaattcctcacacggacggcaactttcacccttctccgctgatgggagggtttggaatgaagcacccgcctcctcagatcctcatcaaaaacacacctgtacctgcggatcctccaacggccttcaacaaggacaagctgaactctttcatcacccagtattctactggccaagtcagcgtggagatcgagtgggagctgcagaaggaaaacagcaagcgctggaacccggagatccagtacacttccaactattacaagtctaataatgttgaatttgctgttaatactgaaggtgtatatagtgaaccccgccccattggcacgcggtatttaacgaggaactta

SEQ ID NO: 17 - DNA, 2226 bp, synthetic construct
  source 1..2226: mol_type = other DNA
atggctgccgatggttatcttccagattggctcgaggacaaccttagtgaaggaattcgcgagtggtgggctttgaaacctggagcccctcaacccaaggcaaatcaacaacatcaagacaacgctcgaggtcttgtgcttccgggttacaaataccttggacccggcaacggactcgacaagggggagccggtcaacgcagcagacgcggcggccctcgagcacgacaaggcctacgaccagcagctcaaggccggagacaacccgtacctcaagtacaaccacgccgacgccgagttccaggagcggctcaaagaagatacgtcttttgggggcaacctcgggcgagcagtcttccaggccaaaaagaggcttcttgaacctcttggtctggttgaggaagcggctaagacggctcctggaaagaagaggcctgtagagcagtctcctcaggaaccggactcctccgcgggtattggcaaatcgggtgcacagcccgctaaaaagagactcaatttcggtcagactggcgacacagagtcagtcccagaccctcaaccaatcggagaacctcccgcagccccctcaggtgtgggatctcttacaatggcttcaggtggtggcgcaccagtggcagacaataacgaaggtgccgatggagtgggtagttcctcgggaaattggcattgcgattcccaatggctgggggacagagtcatcaccaccagcacccgaacctgggccctgcccacctacaacaatcacctctacaagcaaatctccaacagcacatctggaggatcttcaaatgacaacgcctacttcggctacagcaccccctgggggtattttgacttcaacagattccactgccacttctcaccacgtgactggcagcgactcatcaacaacaactggggattccggcctaagcgactcaacttcaagctcttcaacattcaggtcaaagaggttacggacaacaatggagtcaagaccatcgccaataaccttaccagcacggtccaggtcttcacggactcagactatcagctcccgtacgtgctcgggtcggctcacgagggctgcctcccgccgttcccagcggacgttttcatgattcctcagtacgggtatctgacgcttaatgatggaagccaggccgtgggtcgttcgtccttttactgcctggaatatttcccgtcgcaaatgctaagaacgggtaacaacttccagttcagctacgagtttgagaacgtacctttccatagcagctacgctcacagccaaagcctggaccgactaatgaatccactcatcgatcagtatctgtattacttgagtaagacgtttaatggttctggttctccgcattctaaggcgccgaatctgcagacgttgaagttttcggtagctggtcctagcaacatggctgtccagggaagaaactacatacctggacccagctaccgacaacaacgtgtctcaaccactgtgactcaaaacaacaacagcgaatttgcttggcctggagcttcttcttgggctctcaatggacgtaatagcttgatgaatcctggacctgctatggccagccacaaagaaggagaggaccgtttctttcctttgtctggatctttaatttttggcaaacaaggaactggaagagacaacgtggatgcggacaaagtcatgataaccaacgaagaagaaattaaaactactaacccggtagcaacggagtcctatggacaagtggccacaaaccaccagagtgcccaagcacaggcgcagaccggctgggttcaaaaccaaggaatacttccgggtatggtttggcaggacagagatgtgtacctgcaaggacccatttgggccaaaattcctcacacggacggcaactttcacccttctccgctgatgggagggtttggaatgaagcacccgcctcctcagatcctcatcaaaaacacacctgtacctgcggatcctccaacggccttcaacaaggacaagctgaactctttcatcacccagtattctactggccaagtcagcgtggagatcgagtgggagctgcagaaggaaaacagcaagcgctggaacccggagatccagtacacttccaactattacaagtctaataatgttgaatttgctgttaatactgaaggtgtatatagtgaaccccgccccattggcacgcggtatttaacgaggaactta

SEQ ID NO: 18 - DNA, 2226 bp, synthetic construct
  source 1..2226: mol_type = other DNA
atggctgccgatggttatcttccagattggctcgaggacaaccttagtgaaggaattcgcgagtggtgggctttgaaacctggagcccctcaacccaaggcaaatcaacaacatcaagacaacgctcgaggtcttgtgcttccgggttacaaataccttggacccggcaacggactcgacaagggggagccggtcaacgcagcagacgcggcggccctcgagcacgacaaggcctacgaccagcagctcaaggccggagacaacccgtacctcaagtacaaccacgccgacgccgagttccaggagcggctcaaagaagatacgtcttttgggggcaacctcgggcgagcagtcttccaggccaaaaagaggcttcttgaacctcttggtctggttgaggaagcggctaagacggctcctggaaagaagaggcctgtagagcagtctcctcaggaaccggactcctccgcgggtattggcaaatcgggtgcacagcccgctaaaaagagactcaatttcggtcagactggcgacacagagtcagtcccagaccctcaaccaatcggagaacctcccgcagccccctcaggtgtgggatctcttacaatggcttcaggtggtggcgcaccagtggcagacaataacgaaggtgccgatggagtgggtagttcctcgggaaattggcattgcgattcccaatggctgggggacagagtcatcaccaccagcacccgaacctgggccctgcccacctacaacaatcacctctacaagcaaatctccaacagcacatctggaggatcttcaaatgacaacgcctacttcggctacagcaccccctgggggtattttgacttcaacagattccactgccacttctcaccacgtgactggcagcgactcatcaacaacaactggggattccggcctaagcgactcaacttcaagctcttcaacattcaggtcaaagaggttacggacaacaatggagtcaagaccatcgccaataaccttaccagcacggtccaggtcttcacggactcagactatcagctcccgtacgtgctcgggtcggctcacgagggctgcctcccgccgttcccagcggacgttttcatgattcctcagtacgggtatctgacgcttaatgatggaagccaggccgtgggtcgttcgtccttttactgcctggaatatttcccgtcgcaaatgctaagaacgggtaacaacttccagttcagctacgagtttgagaacgtacctttccatagcagctacgctcacagccaaagcctggaccgactaatgaatccactcatcgatcagtatctgtattacttgagtaagacggagaagacgtctggttctccgcattctaaggcgcagaatcagcagacgttgaagttttcggtagctggtcctagcaacatggctgtccagggaagaaactacatacctggacccagctaccgacaacaacgtgtctcaaccactgtgactcaaaacaacaacagcgaatttgcttggcctggagcttcttcttgggctctcaatggacgtaatagcttgatgaatcctggacctgctatggccagccacaaagaaggagaggaccgtttctttcctttgtctggatctttaatttttggcaaacaaggaactggaagagacaacgtggatgcggacaaagtcatgataaccaacgaagaagaaattaaaactactaacccggtagcaacggagtcctatggacaagtggccacaaaccaccagagtgcccaagcacaggcgcagaccggctgggttcaaaaccaaggaatacttccgggtatggtttggcaggacagagatgtgtacctgcaaggacccatttgggccaaaattcctcacacggacggcaactttcacccttctccgctgatgggagggtttggaatgaagcacccgcctcctcagatcctcatcaaaaacacacctgtacctgcggatcctccaacggccttcaacaaggacaagctgaactctttcatcacccagtattctactggccaagtcagcgtggagatcgagtgggagctgcagaaggaaaacagcaagcgctggaacccggagatccagtacacttccaactattacaagtctaataatgttgaatttgctgttaatactgaaggtgtatatagtgaaccccgccccattggcacgcggtatttaacgaggaactta

SEQ ID NO: 19 - DNA, 2226 bp, synthetic construct
  source 1..2226: mol_type = other DNA
atggctgccgatggttatcttccagattggctcgaggacaaccttagtgaaggaattcgcgagtggtgggctttgaaacctggagcccctcaacccaaggcaaatcaacaacatcaagacaacgctcgaggtcttgtgcttccgggttacaaataccttggacccggcaacggactcgacaagggggagccggtcaacgcagcagacgcggcggccctcgagcacgacaaggcctacgaccagcagctcaaggccggagacaacccgtacctcaagtacaaccacgccgacgccgagttccaggagcggctcaaagaagatacgtcttttgggggcaacctcgggcgagcagtcttccaggccaaaaagaggcttcttgaacctcttggtctggttgaggaagcggctaagacggctcctggaaagaagaggcctgtagagcagtctcctcaggaaccggactcctccgcgggtattggcaaatcgggtgcacagcccgctaaaaagagactcaatttcggtcagactggcgacacagagtcagtcccagaccctcaaccaatcggagaacctcccgcagccccctcaggtgtgggatctcttacaatggcttcaggtggtggcgcaccagtggcagacaataacgaaggtgccgatggagtgggtagttcctcgggaaattggcattgcgattcccaatggctgggggacagagtcatcaccaccagcacccgaacctgggccctgcccacctacaacaatcacctctacaagcaaatctccaacagcacatctggaggatcttcaaatgacaacgcctacttcggctacagcaccccctgggggtattttgacttcaacagattccactgccacttctcaccacgtgactggcagcgactcatcaacaacaactggggattccggcctaagcgactcaacttcaagctcttcaacattcaggtcaaagaggttacggacaacaatggagtcaagaccatcgccaataaccttaccagcacggtccaggtcttcacggactcagactatcagctcccgtacgtgctcgggtcggctcacgagggctgcctcccgccgttcccagcggacgttttcatgattcctcagtacgggtatctgacgcttaatgatggaagccaggccgtgggtcgttcgtccttttactgcctggaatatttcccgtcgcaaatgctaagaacgggtaacaacttccagttcagctacgagtttgagaacgtacctttccatagcagctacgctcacagccaaagcctggaccgactaatgaatccactcatcgatcagtatctgtattacttgagtaagacgatgaatggtcatgattctccgcattctaaggcgcagaatcagcagacgttgaagttttcggtagctggtcctagcaacatggctgtccagggaagaaactacatacctggacccagctaccgacaacaacgtgtctcaaccactgtgactcaaaacaacaacagcgaatttgcttggcctggagcttcttcttgggctctcaatggacgtaatagcttgatgaatcctggacctgctatggccagccacaaagaaggagaggaccgtttctttcctttgtctggatctttaatttttggcaaacaaggaactggaagagacaacgtggatgcggacaaagtcatgataaccaacgaagaagaaattaaaactactaacccggtagcaacggagtcctatggacaagtggccacaaaccaccagagtgcccaagcacaggcgcagaccggctgggttcaaaaccaaggaatacttccgggtatggtttggcaggacagagatgtgtacctgcaaggacccatttgggccaaaattcctcacacggacggcaactttcacccttctccgctgatgggagggtttggaatgaagcacccgcctcctcagatcctcatcaaaaacacacctgtacctgcggatcctccaacggccttcaacaaggacaagctgaactctttcatcacccagtattctactggccaagtcagcgtggagatcgagtgggagctgcagaaggaaaacagcaagcgctggaacccggagatccagtacacttccaactattacaagtctaataatgttgaatttgctgttaatactgaaggtgtatatagtgaaccccgccccattggcacgcggtatttaacgaggaactta

SEQ ID NO: 20 - DNA, 2226 bp, synthetic construct
  source 1..2226: mol_type = other DNA
atggctgccgatggttatcttccagattggctcgaggacaaccttagtgaaggaattcgcgagtggtgggctttgaaacctggagcccctcaacccaaggcaaatcaacaacatcaagacaacgctcgaggtcttgtgcttccgggttacaaataccttggacccggcaacggactcgacaagggggagccggtcaacgcagcagacgcggcggccctcgagcacgacaaggcctacgaccagcagctcaaggccggagacaacccgtacctcaagtacaaccacgccgacgccgagttccaggagcggctcaaagaagatacgtcttttgggggcaacctcgggcgagcagtcttccaggccaaaaagaggcttcttgaacctcttggtctggttgaggaagcggctaagacggctcctggaaagaagaggcctgtagagcagtctcctcaggaaccggactcctccgcgggtattggcaaatcgggtgcacagcccgctaaaaagagactcaatttcggtcagactggcgacacagagtcagtcccagaccctcaaccaatcggagaacctcccgcagccccctcaggtgtgggatctcttacaatggcttcaggtggtggcgcaccagtggcagacaataacgaaggtgccgatggagtgggtagttcctcgggaaattggcattgcgattcccaatggctgggggacagagtcatcaccaccagcacccgaacctgggccctgcccacctacaacaatcacctctacaagcaaatctccaacagcacatctggaggatcttcaaatgacaacgcctacttcggctacagcaccccctgggggtattttgacttcaacagattccactgccacttctcaccacgtgactggcagcgactcatcaacaacaactggggattccggcctaagcgactcaacttcaagctcttcaacattcaggtcaaagaggttacggacaacaatggagtcaagaccatcgccaataaccttaccagcacggtccaggtcttcacggactcagactatcagctcccgtacgtgctcgggtcggctcacgagggctgcctcccgccgttcccagcggacgttttcatgattcctcagtacgggtatctgacgcttaatgatggaagccaggccgtgggtcgttcgtccttttactgcctggaatatttcccgtcgcaaatgctaagaacgggtaacaacttccagttcagctacgagtttgagaacgtacctttccatagcagctacgctcacagccaaagcctggaccgactaatgaatccactcatcgatcagtatctgtattacttgagtaagacgattgatggtcatgattctccgcattctaaggcgcagaatcagcagacgttgaagttttcggtagctggtcctagcaacatggctgtccagggaagaaactacatacctggacccagctaccgacaacaacgtgtctcaaccactgtgactcaaaacaacaacagcgaatttgcttggcctggagcttcttcttgggctctcaatggacgtaatagcttgatgaatcctggacctgctatggccagccacaaagaaggagaggaccgtttctttcctttgtctggatctttaatttttggcaaacaaggaactggaagagacaacgtggatgcggacaaagtcatgataaccaacgaagaagaaattaaaactactaacccggtagcaacggagtcctatggacaagtggccacaaaccaccagagtgcccaagcacaggcgcagaccggctgggttcaaaaccaaggaatacttccgggtatggtttggcaggacagagatgtgtacctgcaaggacccatttgggccaaaattcctcacacggacggcaactttcacccttctccgctgatgggagggtttggaatgaagcacccgcctcctcagatcctcatcaaaaacacacctgtacctgcggatcctccaacggccttcaacaaggacaagctgaactctttcatcacccagtattctactggccaagtcagcgtggagatcgagtgggagctgcagaaggaaaacagcaagcgctggaacccggagatccagtacacttccaactattacaagtctaataatgttgaatttgctgttaatactgaaggtgtatatagtgaaccccgccccattggcacgcggtatttaacgaggaactta

SEQ ID NO: 21 - DNA, 2226 bp, synthetic construct
  source 1..2226: mol_type = other DNA
atggctgccgatggttatcttccagattggctcgaggacaaccttagtgaaggaattcgcgagtggtgggctttgaaacctggagcccctcaacccaaggcaaatcaacaacatcaagacaacgctcgaggtcttgtgcttccgggttacaaataccttggacccggcaacggactcgacaagggggagccggtcaacgcagcagacgcggcggccctcgagcacgacaaggcctacgaccagcagctcaaggccggagacaacccgtacctcaagtacaaccacgccgacgccgagttccaggagcggctcaaagaagatacgtcttttgggggcaacctcgggcgagcagtcttccaggccaaaaagaggcttcttgaacctcttggtctggttgaggaagcggctaagacggctcctggaaagaagaggcctgtagagcagtctcctcaggaaccggactcctccgcgggtattggcaaatcgggtgcacagcccgctaaaaagagactcaatttcggtcagactggcgacacagagtcagtcccagaccctcaaccaatcggagaacctcccgcagccccctcaggtgtgggatctcttacaatggcttcaggtggtggcgcaccagtggcagacaataacgaaggtgccgatggagtgggtagttcctcgggaaattggcattgcgattcccaatggctgggggacagagtcatcaccaccagcacccgaacctgggccctgcccacctacaacaatcacctctacaagcaaatctccaacagcacatctggaggatcttcaaatgacaacgcctacttcggctacagcaccccctgggggtattttgacttcaacagattccactgccacttctcaccacgtgactggcagcgactcatcaacaacaactggggattccggcctaagcgactcaacttcaagctcttcaacattcaggtcaaagaggttacggacaacaatggagtcaagaccatcgccaataaccttaccagcacggtccaggtcttcacggactcagactatcagctcccgtacgtgctcgggtcggctcacgagggctgcctcccgccgttcccagcggacgttttcatgattcctcagtacgggtatctgacgcttaatgatggaagccaggccgtgggtcgttcgtccttttactgcctggaatatttcccgtcgcaaatgctaagaacgggtaacaacttccagttcagctacgagtttgagaacgtacctttccatagcagctacgctcacagccaaagcctggaccgactaatgaatccactcatcgatcagtatctgtattacttgagtaagacgaataatggtcatgattctccgcattctaaggcgcagaatcagcagacgttgaagttttcggtagctggtcctagcaacatggctgtccagggaagaaactacatacctggacccagctaccgacaacaacgtgtctcaaccactgtgactcaaaacaacaacagcgaatttgcttggcctggagcttcttcttgggctctcaatggacgtaatagcttgatgaatcctggacctgctatggccagccacaaagaaggagaggaccgtttctttcctttgtctggatctttaatttttggcaaacaaggaactggaagagacaacgtggatgcggacaaagtcatgataaccaacgaagaagaaattaaaactactaacccggtagcaacggagtcctatggacaagtggccacaaaccaccagagtgcccaagcacaggcgcagaccggctgggttcaaaaccaaggaatacttccgggtatggtttggcaggacagagatgtgtacctgcaaggacccatttgggccaaaattcctcacacggacggcaactttcacccttctccgctgatgggagggtttggaatgaagcacccgcctcctcagatcctcatcaaaaacacacctgtacctgcggatcctccaacggccttcaacaaggacaagctgaactctttcatcacccagtattctactggccaagtcagcgtggagatcgagtgggagctgcagaaggaaaacagcaagcgctggaacccggagatccagtacacttccaactattacaagtctaataatgttgaatttgctgttaatactgaaggtgtatatagtgaaccccgccccattggcacgcggtatttaacgaggaactta

SEQ ID NO: 22 - DNA, 2226 bp, synthetic construct
  source 1..2226: mol_type = other DNA
atggctgccgatggttatcttccagattggctcgaggacaaccttagtgaaggaattcgcgagtggtgggctttgaaacctggagcccctcaacccaaggcaaatcaacaacatcaagacaacgctcgaggtcttgtgcttccgggttacaaataccttggacccggcaacggactcgacaagggggagccggtcaacgcagcagacgcggcggccctcgagcacgacaaggcctacgaccagcagctcaaggccggagacaacccgtacctcaagtacaaccacgccgacgccgagttccaggagcggctcaaagaagatacgtcttttgggggcaacctcgggcgagcagtcttccaggccaaaaagaggcttcttgaacctcttggtctggttgaggaagcggctaagacggctcctggaaagaagaggcctgtagagcagtctcctcaggaaccggactcctccgcgggtattggcaaatcgggtgcacagcccgctaaaaagagactcaatttcggtcagactggcgacacagagtcagtcccagaccctcaaccaatcggagaacctcccgcagccccctcaggtgtgggatctcttacaatggcttcaggtggtggcgcaccagtggcagacaataacgaaggtgccgatggagtgggtagttcctcgggaaattggcattgcgattcccaatggctgggggacagagtcatcaccaccagcacccgaacctgggccctgcccacctacaacaatcacctctacaagcaaatctccaacagcacatctggaggatcttcaaatgacaacgcctacttcggctacagcaccccctgggggtattttgacttcaacagattccactgccacttctcaccacgtgactggcagcgactcatcaacaacaactggggattccggcctaagcgactcaacttcaagctcttcaacattcaggtcaaagaggttacggacaacaatggagtcaagaccatcgccaataaccttaccagcacggtccaggtcttcacggactcagactatcagctcccgtacgtgctcgggtcggctcacgagggctgcctcccgccgttcccagcggacgttttcatgattcctcagtacgggtatctgacgcttaatgatggaagccaggccgtgggtcgttcgtccttttactgcctggaatatttcccgtcgcaaatgctaagaacgggtaacaacttccagttcagctacgagtttgagaacgtacctttccatagcagctacgctcacagccaaagcctggaccgactaatgaatccactcatcgatcagtatctgtattacttgagtaagacgcagcgtaagtctggttctccgcattctaaggcgcagaatcagcagacgttgaagttttcggtagctggtcctagcaacatggctgtccagggaagaaactacatacctggacccagctaccgacaacaacgtgtctcaaccactgtgactcaaaacaacaacagcgaatttgcttggcctggagcttcttcttgggctctcaatggacgtaatagcttgatgaatcctggacctgctatggccagccacaaagaaggagaggaccgtttctttcctttgtctggatctttaatttttggcaaacaaggaactggaagagacaacgtggatgcggacaaagtcatgataaccaacgaagaagaaattaaaactactaacccggtagcaacggagtcctatggacaagtggccacaaaccaccagagtgcccaagcacaggcgcagaccggctgggttcaaaaccaaggaatacttccgggtatggtttggcaggacagagatgtgtacctgcaaggacccatttgggccaaaattcctcacacggacggcaactttcacccttctccgctgatgggagggtttggaatgaagcacccgcctcctcagatcctcatcaaaaacacacctgtacctgcggatcctccaacggccttcaacaaggacaagctgaactctttcatcacccagtattctactggccaagtcagcgtggagatcgagtgggagctgcagaaggaaaacagcaagcgctggaacccggagatccagtacacttccaactattacaagtctaataatgttgaatttgctgttaatactgaaggtgtatatagtgaaccccgccccattggcacgcggtatttaacgaggaactta

SEQ ID NO: 23 - DNA, 2226 bp, synthetic construct
  source 1..2226: mol_type = other DNA
atggctgccgatggttatcttccagattggctcgaggacaaccttagtgaaggaattcgcgagtggtgggctttgaaacctggagcccctcaacccaaggcaaatcaacaacatcaagacaacgctcgaggtcttgtgcttccgggttacaaataccttggacccggcaacggactcgacaagggggagccggtcaacgcagcagacgcggcggccctcgagcacgacaaggcctacgaccagcagctcaaggccggagacaacccgtacctcaagtacaaccacgccgacgccgagttccaggagcggctcaaagaagatacgtcttttgggggcaacctcgggcgagcagtcttccaggccaaaaagaggcttcttgaacctcttggtctggttgaggaagcggctaagacggctcctggaaagaagaggcctgtagagcagtctcctcaggaaccggactcctccgcgggtattggcaaatcgggtgcacagcccgctaaaaagagactcaatttcggtcagactggcgacacagagtcagtcccagaccctcaaccaatcggagaacctcccgcagccccctcaggtgtgggatctcttacaatggcttcaggtggtggcgcaccagtggcagacaataacgaaggtgccgatggagtgggtagttcctcgggaaattggcattgcgattcccaatggctgggggacagagtcatcaccaccagcacccgaacctgggccctgcccacctacaacaatcacctctacaagcaaatctccaacagcacatctggaggatcttcaaatgacaacgcctacttcggctacagcaccccctgggggtattttgacttcaacagattccactgccacttctcaccacgtgactggcagcgactcatcaacaacaactggggattccggcctaagcgactcaacttcaagctcttcaacattcaggtcaaagaggttacggacaacaatggagtcaagaccatcgccaataaccttaccagcacggtccaggtcttcacggactcagactatcagctcccgtacgtgctcgggtcggctcacgagggctgcctcccgccgttcccagcggacgttttcatgattcctcagtacgggtatctgacgcttaatgatggaagccaggccgtgggtcgttcgtccttttactgcctggaatatttcccgtcgcaaatgctaagaacgggtaacaacttccagttcagctacgagtttgagaacgtacctttccatagcagctacgctcacagccaaagcctggaccgactaatgaatccactcatcgatcagtatctgtattacttgagtaagacgattaatggttctggttctccgcattctaaggcgcaggcgcgtaagacgttgaagttttcggtagctggtcctagcaacatggctgtccagggaagaaactacatacctggacccagctaccgacaacaacgtgtctcaaccactgtgactcaaaacaacaacagcgaatttgcttggcctggagcttcttcttgggctctcaatggacgtaatagcttgatgaatcctggacctgctatggccagccacaaagaaggagaggaccgtttctttcctttgtctggatctttaatttttggcaaacaaggaactggaagagacaacgtggatgcggacaaagtcatgataaccaacgaagaagaaattaaaactactaacccggtagcaacggagtcctatggacaagtggccacaaaccaccagagtgcccaagcacaggcgcagaccggctgggttcaaaaccaaggaatacttccgggtatggtttggcaggacagagatgtgtacctgcaaggacccatttgggccaaaattcctcacacggacggcaactttcacccttctccgctgatgggagggtttggaatgaagcacccgcctcctcagatcctcatcaaaaacacacctgtacctgcggatcctccaacggccttcaacaaggacaagctgaactctttcatcacccagtattctactggccaagtcagcgtggagatcgagtgggagctgcagaaggaaaacagcaagcgctggaacccggagatccagtacacttccaactattacaagtctaataatgttgaatttgctgttaatactgaaggtgtatatagtgaaccccgccccattggcacgcggtatttaacgaggaactta

SEQ ID NO: 24 - DNA, 2226 bp, synthetic construct
  source 1..2226: mol_type = other DNA
atggctgccgatggttatcttccagattggctcgaggacaaccttagtgaaggaattcgcgagtggtgggctttgaaacctggagcccctcaacccaaggcaaatcaacaacatcaagacaacgctcgaggtcttgtgcttccgggttacaaataccttggacccggcaacggactcgacaagggggagccggtcaacgcagcagacgcggcggccctcgagcacgacaaggcctacgaccagcagctcaaggccggagacaacccgtacctcaagtacaaccacgccgacgccgagttccaggagcggctcaaagaagatacgtcttttgggggcaacctcgggcgagcagtcttccaggccaaaaagaggcttcttgaacctcttggtctggttgaggaagcggctaagacggctcctggaaagaagaggcctgtagagcagtctcctcaggaaccggactcctccgcgggtattggcaaatcgggtgcacagcccgctaaaaagagactcaatttcggtcagactggcgacacagagtcagtcccagaccctcaaccaatcggagaacctcccgcagccccctcaggtgtgggatctcttacaatggcttcaggtggtggcgcaccagtggcagacaataacgaaggtgccgatggagtgggtagttcctcgggaaattggcattgcgattcccaatggctgggggacagagtcatcaccaccagcacccgaacctgggccctgcccacctacaacaatcacctctacaagcaaatctccaacagcacatctggaggatcttcaaatgacaacgcctacttcggctacagcaccccctgggggtattttgacttcaacagattccactgccacttctcaccacgtgactggcagcgactcatcaacaacaactggggattccggcctaagcgactcaacttcaagctcttcaacattcaggtcaaagaggttacggacaacaatggagtcaagaccatcgccaataaccttaccagcacggtccaggtcttcacggactcagactatcagctcccgtacgtgctcgggtcggctcacgagggctgcctcccgccgttcccagcggacgttttcatgattcctcagtacgggtatctgacgcttaatgatggaagccaggccgtgggtcgttcgtccttttactgcctggaatatttcccgtcgcaaatgctaagaacgggtaacaacttccagttcagctacgagtttgagaacgtacctttccatagcagctacgctcacagccaaagcctggaccgactaatgaatccactcatcgatcagtatctgtattacttgagtaagtatattgtgggttctggttctccgcattctaaggcgcagaatcagcagacgttgaagttttcggtagctggtcctagcaacatggctgtccagggaagaaactacatacctggacccagctaccgacaacaacgtgtctcaaccactgtgactcaaaacaacaacagcgaatttgcttggcctggagcttcttcttgggctctcaatggacgtaatagcttgatgaatcctggacctgctatggccagccacaaagaaggagaggaccgtttctttcctttgtctggatctttaatttttggcaaacaaggaactggaagagacaacgtggatgcggacaaagtcatgataaccaacgaagaagaaattaaaactactaacccggtagcaacggagtcctatggacaagtggccacaaaccaccagagtgcccaagcacaggcgcagaccggctgggttcaaaaccaaggaatacttccgggtatggtttggcaggacagagatgtgtacctgcaaggacccatttgggccaaaattcctcacacggacggcaactttcacccttctccgctgatgggagggtttggaatgaagcacccgcctcctcagatcctcatcaaaaacacacctgtacctgcggatcctccaacggccttcaacaaggacaagctgaactctttcatcacccagtattctactggccaagtcagcgtggagatcgagtgggagctgcagaaggaaaacagcaagcgctggaacccggagatccagtacacttccaactattacaagtctaataatgttgaatttgctgttaatactgaaggtgtatatagtgaaccccgccccattggcacgcggtatttaacgaggaactta

SEQ ID NO: 25 - DNA, 2226 bp, synthetic construct
  source 1..2226: mol_type = other DNA
atggctgccgatggttatcttccagattggctcgaggacaaccttagtgaaggaattcgcgagtggtgggctttgaaacctggagcccctcaacccaaggcaaatcaacaacatcaagacaacgctcgaggtcttgtgcttccgggttacaaataccttggacccggcaacggactcgacaagggggagccggtcaacgcagcagacgcggcggccctcgagcacgacaaggcctacgaccagcagctcaaggccggagacaacccgtacctcaagtacaaccacgccgacgccgagttccaggagcggctcaaagaagatacgtcttttgggggcaacctcgggcgagcagtcttccaggccaaaaagaggcttcttgaacctcttggtctggttgaggaagcggctaagacggctcctggaaagaagaggcctgtagagcagtctcctcaggaaccggactcctccgcgggtattggcaaatcgggtgcacagcccgctaaaaagagactcaatttcggtcagactggcgacacagagtcagtcccagaccctcaaccaatcggagaacctcccgcagccccctcaggtgtgggatctcttacaatggcttcaggtggtggcgcaccagtggcagacaataacgaaggtgccgatggagtgggtagttcctcgggaaattggcattgcgattcccaatggctgggggacagagtcatcaccaccagcacccgaacctgggccctgcccacctacaacaatcacctctacaagcaaatctccaacagcacatctggaggatcttcaaatgacaacgcctacttcggctacagcaccccctgggggtattttgacttcaacagattccactgccacttctcaccacgtgactggcagcgactcatcaacaacaactggggattccggcctaagcgactcaacttcaagctcttcaacattcaggtcaaagaggttacggacaacaatggagtcaagaccatcgccaataaccttaccagcacggtccaggtcttcacggactcagactatcagctcccgtacgtgctcgggtcggctcacgagggctgcctcccgccgttcccagcggacgttttcatgattcctcagtacgggtatctgacgcttaatgatggaagccaggccgtgggtcgttcgtccttttactgcctggaatatttcccgtcgcaaatgctaagaacgggtaacaacttccagttcagctacgagtttgagaacgtacctttccatagcagctacgctcacagccaaagcctggaccgactaatgaatccactcatcgatcagtatctgtattacttgagtaagacgatttctaagcgtggttctccgcattctaaggcgcagaatcagcagacgttgaagttttcggtagctggtcctagcaacatggctgtccagggaagaaactacatacctggacccagctaccgacaacaacgtgtctcaaccactgtgactcaaaacaacaacagcgaatttgcttggcctggagcttcttcttgggctctcaatggacgtaatagcttgatgaatcctggacctgctatggccagccacaaagaaggagaggaccgtttctttcctttgtctggatctttaatttttggcaaacaaggaactggaagagacaacgtggatgcggacaaagtcatgataaccaacgaagaagaaattaaaactactaacccggtagcaacggagtcctatggacaagtggccacaaaccaccagagtgcccaagcacaggcgcagaccggctgggttcaaaaccaaggaatacttccgggtatggtttggcaggacagagatgtgtacctgcaaggacccatttgggccaaaattcctcacacggacggcaactttcacccttctccgctgatgggagggtttggaatgaagcacccgcctcctcagatcctcatcaaaaacacacctgtacctgcggatcctccaacggccttcaacaaggacaagctgaactctttcatcacccagtattctactggccaagtcagcgtggagatcgagtgggagctgcagaaggaaaacagcaagcgctggaacccggagatccagtacacttccaactattacaagtctaataatgttgaatttgctgttaatactgaaggtgtatatagtgaaccccgccccattggcacgcggtatttaacgaggaactta

SEQ ID NO: 26 - DNA, 2226 bp, synthetic construct
  source 1..2226: mol_type = other DNA
atggctgccgatggttatcttccagattggctcgaggacaaccttagtgaaggaattcgcgagtggtgggctttgaaacctggagcccctcaacccaaggcaaatcaacaacatcaagacaacgctcgaggtcttgtgcttccgggttacaaataccttggacccggcaacggactcgacaagggggagccggtcaacgcagcagacgcggcggccctcgagcacgacaaggcctacgaccagcagctcaaggccggagacaacccgtacctcaagtacaaccacgccgacgccgagttccaggagcggctcaaagaagatacgtcttttgggggcaacctcgggcgagcagtcttccaggccaaaaagaggcttcttgaacctcttggtctggttgaggaagcggctaagacggctcctggaaagaagaggcctgtagagcagtctcctcaggaaccggactcctccgcgggtattggcaaatcgggtgcacagcccgctaaaaagagactcaatttcggtcagactggcgacacagagtcagtcccagaccctcaaccaatcggagaacctcccgcagccccctcaggtgtgggatctcttacaatggcttcaggtggtggcgcaccagtggcagacaataacgaaggtgccgatggagtgggtagttcctcgggaaattggcattgcgattcccaatggctgggggacagagtcatcaccaccagcacccgaacctgggccctgcccacctacaacaatcacctctacaagcaaatctccaacagcacatctggaggatcttcaaatgacaacgcctacttcggctacagcaccccctgggggtattttgacttcaacagattccactgccacttctcaccacgtgactggcagcgactcatcaacaacaactggggattccggcctaagcgactcaacttcaagctcttcaacattcaggtcaaagaggttacggacaacaatggagtcaagaccatcgccaataaccttaccagcacggtccaggtcttcacggactcagactatcagctcccgtacgtgctcgggtcggctcacgagggctgcctcccgccgttcccagcggacgttttcatgattcctcagtacgggtatctgacgcttaatgatggaagccaggccgtgggtcgttcgtccttttactgcctggaatatttcccgtcgcaaatgctaagaacgggtaacaacttccagttcagctacgagtttgagaacgtacctttccatagcagctacgctcacagccaaagcctggaccgactaatgaatccactcatcgatcagtatctgtattacttgagtaagggtctgggtggttctggttctccgcattctaaggcgcagaatcagcagacgttgaagttttcggtagctggtcctagcaacatggctgtccagggaagaaactacatacctggacccagctaccgacaacaacgtgtctcaaccactgtgactcaaaacaacaacagcgaatttgcttggcctggagcttcttcttgggctctcaatggacgtaatagcttgatgaatcctggacctgctatggccagccacaaagaaggagaggaccgtttctttcctttgtctggatctttaatttttggcaaacaaggaactggaagagacaacgtggatgcggacaaagtcatgataaccaacgaagaagaaattaaaactactaacccggtagcaacggagtcctatggacaagtggccacaaaccaccagagtgcccaagcacaggcgcagaccggctgggttcaaaaccaaggaatacttccgggtatggtttggcaggacagagatgtgtacctgcaaggacccatttgggccaaaattcctcacacggacggcaactttcacccttctccgctgatgggagggtttggaatgaagcacccgcctcctcagatcctcatcaaaaacacacctgtacctgcggatcctccaacggccttcaacaaggacaagctgaactctttcatcacccagtattctactggccaagtcagcgtggagatcgagtgggagctgcagaaggaaaacagcaagcgctggaacccggagatccagtacacttccaactattacaagtctaataatgttgaatttgctgttaatactgaaggtgtatatagtgaaccccgccccattggcacgcggtatttaacgaggaactta

SEQ ID NO: 27 - DNA, 2226 bp, synthetic construct
  source 1..2226: mol_type = other DNA
atggctgccgatggttatcttccagattggctcgaggacaaccttagtgaaggaattcgcgagtggtgggctttgaaacctggagcccctcaacccaaggcaaatcaacaacatcaagacaacgctcgaggtcttgtgcttccgggttacaaataccttggacccggcaacggactcgacaagggggagccggtcaacgcagcagacgcggcggccctcgagcacgacaaggcctacgaccagcagctcaaggccggagacaacccgtacctcaagtacaaccacgccgacgccgagttccaggagcggctcaaagaagatacgtcttttgggggcaacctcgggcgagcagtcttccaggccaaaaagaggcttcttgaacctcttggtctggttgaggaagcggctaagacggctcctggaaagaagaggcctgtagagcagtctcctcaggaaccggactcctccgcgggtattggcaaatcgggtgcacagcccgctaaaaagagactcaatttcggtcagactggcgacacagagtcagtcccagaccctcaaccaatcggagaacctcccgcagccccctcaggtgtgggatctcttacaatggcttcaggtggtggcgcaccagtggcagacaataacgaaggtgccgatggagtgggtagttcctcgggaaattggcattgcgattcccaatggctgggggacagagtcatcaccaccagcacccgaacctgggccctgcccacctacaacaatcacctctacaagcaaatctccaacagcacatctggaggatcttcaaatgacaacgcctacttcggctacagcaccccctgggggtattttgacttcaacagattccactgccacttctcaccacgtgactggcagcgactcatcaacaacaactggggattccggcctaagcgactcaacttcaagctcttcaacattcaggtcaaagaggttacggacaacaatggagtcaagaccatcgccaataaccttaccagcacggtccaggtcttcacggactcagactatcagctcccgtacgtgctcgggtcggctcacgagggctgcctcccgccgttcccagcggacgttttcatgattcctcagtacgggtatctgacgcttaatgatggaagccaggccgtgggtcgttcgtccttttactgcctggaatatttcccgtcgcaaatgctaagaacgggtaacaacttccagttcagctacgagtttgagaacgtacctttccatagcagctacgctcacagccaaagcctggaccgactaatgaatccactcatcgatcagtatctgtattacttgagtaagacgattaatggtcatgattctccgcattctaaggcgcagaatctgcagacgttgaagttttcggtagctggtcctagcaacatggctgtccagggaagaaactacatacctggacccagctaccgacaacaacgtgtctcaaccactgtgactcaaaacaacaacagcgaatttgcttggcctggagcttcttcttgggctctcaatggacgtaatagcttgatgaatcctggacctgctatggccagccacaaagaaggagaggaccgtttctttcctttgtctggatctttaatttttggcaaacaaggaactggaagagacaacgtggatgcggacaaagtcatgataaccaacgaagaagaaattaaaactactaacccggtagcaacggagtcctatggacaagtggccacaaaccaccagagtgcccaagcacaggcgcagaccggctgggttcaaaaccaaggaatacttccgggtatggtttggcaggacagagatgtgtacctgcaaggacccatttgggccaaaattcctcacacggacggcaactttcacccttctccgctgatgggagggtttggaatgaagcacccgcctcctcagatcctcatcaaaaacacacctgtacctgcggatcctccaacggccttcaacaaggacaagctgaactctttcatcacccagtattctactggccaagtcagcgtggagatcgagtgggagctgcagaaggaaaacagcaagcgctggaacccggagatccagtacacttccaactattacaagtctaataatgttgaatttgctgttaatactgaaggtgtatatagtgaaccccgccccattggcacgcggtatttaacgaggaactta

SEQ ID NO: 28 - DNA, 2226 bp, synthetic construct
  source 1..2226: mol_type = other DNA
atggctgccgatggttatcttccagattggctcgaggacaaccttagtgaaggaattcgcgagtggtgggctttgaaacctggagcccctcaacccaaggcaaatcaacaacatcaagacaacgctcgaggtcttgtgcttccgggttacaaataccttggacccggcaacggactcgacaagggggagccggtcaacgcagcagacgcggcggccctcgagcacgacaaggcctacgaccagcagctcaaggccggagacaacccgtacctcaagtacaaccacgccgacgccgagttccaggagcggctcaaagaagatacgtcttttgggggcaacctcgggcgagcagtcttccaggccaaaaagaggcttcttgaacctcttggtctggttgaggaagcggctaagacggctcctggaaagaagaggcctgtagagcagtctcctcaggaaccggactcctccgcgggtattggcaaatcgggtgcacagcccgctaaaaagagactcaatttcggtcagactggcgacacagagtcagtcccagaccctcaaccaatcggagaacctcccgcagccccctcaggtgtgggatctcttacaatggcttcaggtggtggcgcaccagtggcagacaataacgaaggtgccgatggagtgggtagttcctcgggaaattggcattgcgattcccaatggctgggggacagagtcatcaccaccagcacccgaacctgggccctgcccacctacaacaatcacctctacaagcaaatctccaacagcacatctggaggatcttcaaatgacaacgcctacttcggctacagcaccccctgggggtattttgacttcaacagattccactgccacttctcaccacgtgactggcagcgactcatcaacaacaactggggattccggcctaagcgactcaacttcaagctcttcaacattcaggtcaaagaggttacggacaacaatggagtcaagaccatcgccaataaccttaccagcacggtccaggtcttcacggactcagactatcagctcccgtacgtgctcgggtcggctcacgagggctgcctcccgccgttcccagcggacgttttcatgattcctcagtacgggtatctgacgcttaatgatggaagccaggccgtgggtcgttcgtccttttactgcctggaatatttcccgtcgcaaatgctaagaacgggtaacaacttccagttcagctacgagtttgagaacgtacctttccatagcagctacgctcacagccaaagcctggaccgactaatgaatccactcatcgatcagtatctgtattacttgagtaagacggtgaatggtcatgattctccgcattctaaggcgcagaatcagcagacgttgaagttttcggtagctggtcctagcaacatggctgtccagggaagaaactacatacctggacccagctaccgacaacaacgtgtctcaaccactgtgactcaaaacaacaacagcgaatttgcttggcctggagcttcttcttgggctctcaatggacgtaatagcttgatgaatcctggacctgctatggccagccacaaagaaggagaggaccgtttctttcctttgtctggatctttaatttttggcaaacaaggaactggaagagacaacgtggatgcggacaaagtcatgataaccaacgaagaagaaattaaaactactaacccggtagcaacggagtcctatggacaagtggccacaaaccaccagagtgcccaagcacaggcgcagaccggctgggttcaaaaccaaggaatacttccgggtatggtttggcaggacagagatgtgtacctgcaaggacccatttgggccaaaattcctcacacggacggcaactttcacccttctccgctgatgggagggtttggaatgaagcacccgcctcctcagatcctcatcaaaaacacacctgtacctgcggatcctccaacggccttcaacaaggacaagctgaactctttcatcacccagtattctactggccaagtcagcgtggagatcgagtgggagctgcagaaggaaaacagcaagcgctggaacccggagatccagtacacttccaactattacaagtctaataatgttgaatttgctgttaatactgaaggtgtatatagtgaaccccgccccattggcacgcggtatttaacgaggaactta

SEQ ID NO: 29 - DNA, 2226 bp, synthetic construct
  source 1..2226: mol_type = other DNA
atggctgccgatggttatcttccagattggctcgaggacaaccttagtgaaggaattcgcgagtggtgggctttgaaacctggagcccctcaacccaaggcaaatcaacaacatcaagacaacgctcgaggtcttgtgcttccgggttacaaataccttggacccggcaacggactcgacaagggggagccggtcaacgcagcagacgcggcggccctcgagcacgacaaggcctacgaccagcagctcaaggccggagacaacccgtacctcaagtacaaccacgccgacgccgagttccaggagcggctcaaagaagatacgtcttttgggggcaacctcgggcgagcagtcttccaggccaaaaagaggcttcttgaacctcttggtctggttgaggaagcggctaagacggctcctggaaagaagaggcctgtagagcagtctcctcaggaaccggactcctccgcgggtattggcaaatcgggtgcacagcccgctaaaaagagactcaatttcggtcagactggcgacacagagtcagtcccagaccctcaaccaatcggagaacctcccgcagccccctcaggtgtgggatctcttacaatggcttcaggtggtggcgcaccagtggcagacaataacgaaggtgccgatggagtgggtagttcctcgggaaattggcattgcgattcccaatggctgggggacagagtcatcaccaccagcacccgaacctgggccctgcccacctacaacaatcacctctacaagcaaatctccaacagcacatctggaggatcttcaaatgacaacgcctacttcggctacagcaccccctgggggtattttgacttcaacagattccactgccacttctcaccacgtgactggcagcgactcatcaacaacaactggggattccggcctaagcgactcaacttcaagctcttcaacattcaggtcaaagaggttacggacaacaatggagtcaagaccatcgccaataaccttaccagcacggtccaggtcttcacggactcagactatcagctcccgtacgtgctcgggtcggctcacgagggctgcctcccgccgttcccagcggacgttttcatgattcctcagtacgggtatctgacgcttaatgatggaagccaggccgtgggtcgttcgtccttttactgcctggaatatttcccgtcgcaaatgctaagaacgggtaacaacttccagttcagctacgagtttgagaacgtacctttccatagcagctacgctcacagccaaagcctggaccgactaatgaatccactcatcgatcagtatctgtattacttgagtaagacgattaatggtcatgattctccgcattctaaggcgctgaatcagcagacgttgaagttttcggtagctggtcctagcaacatggctgtccagggaagaaactacatacctggacccagctaccgacaacaacgtgtctcaaccactgtgactcaaaacaacaacagcgaatttgcttggcctggagcttcttcttgggctctcaatggacgtaatagcttgatgaatcctggacctgctatggccagccacaaagaaggagaggaccgtttctttcctttgtctggatctttaatttttggcaaacaaggaactggaagagacaacgtggatgcggacaaagtcatgataaccaacgaagaagaaattaaaactactaacccggtagcaacggagtcctatggacaagtggccacaaaccaccagagtgcccaagcacaggcgcagaccggctgggttcaaaaccaaggaatacttccgggtatggtttggcaggacagagatgtgtacctgcaaggacccatttgggccaaaattcctcacacggacggcaactttcacccttctccgctgatgggagggtttggaatgaagcacccgcctcctcagatcctcatcaaaaacacacctgtacctgcggatcctccaacggccttcaacaaggacaagctgaactctttcatcacccagtattctactggccaagtcagcgtggagatcgagtgggagctgcagaaggaaaacagcaagcgctggaacccggagatccagtacacttccaactattacaagtctaataatgttgaatttgctgttaatactgaaggtgtatatagtgaaccccgccccattggcacgcggtatttaacgaggaactta

SEQ ID NO: 30 - DNA, 2226 bp, synthetic construct
  source 1..2226: mol_type = other DNA
atggctgccgatggttatcttccagattggctcgaggacaaccttagtgaaggaattcgcgagtggtgggctttgaaacctggagcccctcaacccaaggcaaatcaacaacatcaagacaacgctcgaggtcttgtgcttccgggttacaaataccttggacccggcaacggactcgacaagggggagccggtcaacgcagcagacgcggcggccctcgagcacgacaaggcctacgaccagcagctcaaggccggagacaacccgtacctcaagtacaaccacgccgacgccgagttccaggagcggctcaaagaagatacgtcttttgggggcaacctcgggcgagcagtcttccaggccaaaaagaggcttcttgaacctcttggtctggttgaggaagcggctaagacggctcctggaaagaagaggcctgtagagcagtctcctcaggaaccggactcctccgcgggtattggcaaatcgggtgcacagcccgctaaaaagagactcaatttcggtcagactggcgacacagagtcagtcccagaccctcaaccaatcggagaacctcccgcagccccctcaggtgtgggatctcttacaatggcttcaggtggtggcgcaccagtggcagacaataacgaaggtgccgatggagtgggtagttcctcgggaaattggcattgcgattcccaatggctgggggacagagtcatcaccaccagcacccgaacctgggccctgcccacctacaacaatcacctctacaagcaaatctccaacagcacatctggaggatcttcaaatgacaacgcctacttcggctacagcaccccctgggggtattttgacttcaacagattccactgccacttctcaccacgtgactggcagcgactcatcaacaacaactggggattccggcctaagcgactcaacttcaagctcttcaacattcaggtcaaagaggttacggacaacaatggagtcaagaccatcgccaataaccttaccagcacggtccaggtcttcacggactcagactatcagctcccgtacgtgctcgggtcggctcacgagggctgcctcccgccgttcccagcggacgttttcatgattcctcagtacgggtatctgacgcttaatgatggaagccaggccgtgggtcgttcgtccttttactgcctggaatatttcccgtcgcaaatgctaagaacgggtaacaacttccagttcagctacgagtttgagaacgtacctttccatagcagctacgctcacagccaaagcctggaccgactaatgaatccactcatcgatcagtatctgtattacttgagtaagacgattaatggtcatgattctccgcattctaaggcgcagaatcagcagtctttgaagttttcggtagctggtcctagcaacatggctgtccagggaagaaactacatacctggacccagctaccgacaacaacgtgtctcaaccactgtgactcaaaacaacaacagcgaatttgcttggcctggagcttcttcttgggctctcaatggacgtaatagcttgatgaatcctggacctgctatggccagccacaaagaaggagaggaccgtttctttcctttgtctggatctttaatttttggcaaacaaggaactggaagagacaacgtggatgcggacaaagtcatgataaccaacgaagaagaaattaaaactactaacccggtagcaacggagtcctatggacaagtggccacaaaccaccagagtgcccaagcacaggcgcagaccggctgggttcaaaaccaaggaatacttccgggtatggtttggcaggacagagatgtgtacctgcaaggacccatttgggccaaaattcctcacacggacggcaactttcacccttctccgctgatgggagggtttggaatgaagcacccgcctcctcagatcctcatcaaaaacacacctgtacctgcggatcctccaacggccttcaacaaggacaagctgaactctttcatcacccagtattctactggccaagtcagcgtggagatcgagtgggagctgcagaaggaaaacagcaagcgctggaacccggagatccagtacacttccaactattacaagtctaataatgttgaatttgctgttaatactgaaggtgtatatagtgaaccccgccccattggcacgcggtatttaacgaggaactta

SEQ ID NO: 31 - DNA, 2226 bp, synthetic construct
  source 1..2226: mol_type = other DNA
atggctgccgatggttatcttccagattggctcgaggacaaccttagtgaaggaattcgcgagtggtgggctttgaaacctggagcccctcaacccaaggcaaatcaacaacatcaagacaacgctcgaggtcttgtgcttccgggttacaaataccttggacccggcaacggactcgacaagggggagccggtcaacgcagcagacgcggcggccctcgagcacgacaaggcctacgaccagcagctcaaggccggagacaacccgtacctcaagtacaaccacgccgacgccgagttccaggagcggctcaaagaagatacgtcttttgggggcaacctcgggcgagcagtcttccaggccaaaaagaggcttcttgaacctcttggtctggttgaggaagcggctaagacggctcctggaaagaagaggcctgtagagcagtctcctcaggaaccggactcctccgcgggtattggcaaatcgggtgcacagcccgctaaaaagagactcaatttcggtcagactggcgacacagagtcagtcccagaccctcaaccaatcggagaacctcccgcagccccctcaggtgtgggatctcttacaatggcttcaggtggtggcgcaccagtggcagacaataacgaaggtgccgatggagtgggtagttcctcgggaaattggcattgcgattcccaatggctgggggacagagtcatcaccaccagcacccgaacctgggccctgcccacctacaacaatcacctctacaagcaaatctccaacagcacatctggaggatcttcaaatgacaacgcctacttcggctacagcaccccctgggggtattttgacttcaacagattccactgccacttctcaccacgtgactggcagcgactcatcaacaacaactggggattccggcctaagcgactcaacttcaagctcttcaacattcaggtcaaagaggttacggacaacaatggagtcaagaccatcgccaataaccttaccagcacggtccaggtcttcacggactcagactatcagctcccgtacgtgctcgggtcggctcacgagggctgcctcccgccgttcccagcggacgttttcatgattcctcagtacgggtatctgacgcttaatgatggaagccaggccgtgggtcgttcgtccttttactgcctggaatatttcccgtcgcaaatgctaagaacgggtaacaacttccagttcagctacgagtttgagaacgtacctttccatagcagctacgctcacagccaaagcctggaccgactaatgaatccactcatcgatcagtatctgtattacttgagtaagacgattaatggtcatgattctccgcattctaaggcgcagaatcagcagattttgaagttttcggtagctggtcctagcaacatggctgtccagggaagaaactacatacctggacccagctaccgacaacaacgtgtctcaaccactgtgactcaaaacaacaacagcgaatttgcttggcctggagcttcttcttgggctctcaatggacgtaatagcttgatgaatcctggacctgctatggccagccacaaagaaggagaggaccgtttctttcctttgtctggatctttaatttttggcaaacaaggaactggaagagacaacgtggatgcggacaaagtcatgataaccaacgaagaagaaattaaaactactaacccggtagcaacggagtcctatggacaagtggccacaaaccaccagagtgcccaagcacaggcgcagaccggctgggttcaaaaccaaggaatacttccgggtatggtttggcaggacagagatgtgtacctgcaaggacccatttgggccaaaattcctcacacggacggcaactttcacccttctccgctgatgggagggtttggaatgaagcacccgcctcctcagatcctcatcaaaaacacacctgtacctgcggatcctccaacggccttcaacaaggacaagctgaactctttcatcacccagtattctactggccaagtcagcgtggagatcgagtgggagctgcagaaggaaaacagcaagcgctggaacccggagatccagtacacttccaactattacaagtctaataatgttgaatttgctgttaatactgaaggtgtatatagtgaaccccgccccattggcacgcggtatttaacgaggaactta

SEQ ID NO: 32 - DNA, 2226 bp, synthetic construct
  source 1..2226: mol_type = other DNA
atggctgccgatggttatcttccagattggctcgaggacaaccttagtgaaggaattcgcgagtggtgggctttgaaacctggagcccctcaacccaaggcaaatcaacaacatcaagacaacgctcgaggtcttgtgcttccgggttacaaataccttggacccggcaacggactcgacaagggggagccggtcaacgcagcagacgcggcggccctcgagcacgacaaggcctacgaccagcagctcaaggccggagacaacccgtacctcaagtacaaccacgccgacgccgagttccaggagcggctcaaagaagatacgtcttttgggggcaacctcgggcgagcagtcttccaggccaaaaagaggcttcttgaacctcttggtctggttgaggaagcggctaagacggctcctggaaagaagaggcctgtagagcagtctcctcaggaaccggactcctccgcgggtattggcaaatcgggtgcacagcccgctaaaaagagactcaatttcggtcagactggcgacacagagtcagtcccagaccctcaaccaatcggagaacctcccgcagccccctcaggtgtgggatctcttacaatggcttcaggtggtggcgcaccagtggcagacaataacgaaggtgccgatggagtgggtagttcctcgggaaattggcattgcgattcccaatggctgggggacagagtcatcaccaccagcacccgaacctgggccctgcccacctacaacaatcacctctacaagcaaatctccaacagcacatctggaggatcttcaaatgacaacgcctacttcggctacagcaccccctgggggtattttgacttcaacagattccactgccacttctcaccacgtgactggcagcgactcatcaacaacaactggggattccggcctaagcgactcaacttcaagctcttcaacattcaggtcaaagaggttacggacaacaatggagtcaagaccatcgccaataaccttaccagcacggtccaggtcttcacggactcagactatcagctcccgtacgtgctcgggtcggctcacgagggctgcctcccgccgttcccagcggacgttttcatgattcctcagtacgggtatctgacgcttaatgatggaagccaggccgtgggtcgttcgtccttttactgcctggaatatttcccgtcgcaaatgctaagaacgggtaacaacttccagttcagctacgagtttgagaacgtacctttccatagcagctacgctcacagccaaagcctggaccgactaatgaatccactcatcgatcagtatctgtattacttgagtaagacgattaatggttctggttctccgcattttacgcgtcagaatcagcagacgttgaagttttcggtagctggtcctagcaacatggctgtccagggaagaaactacatacctggacccagctaccgacaacaacgtgtctcaaccactgtgactcaaaacaacaacagcgaatttgcttggcctggagcttcttcttgggctctcaatggacgtaatagcttgatgaatcctggacctgctatggccagccacaaagaaggagaggaccgtttctttcctttgtctggatctttaatttttggcaaacaaggaactggaagagacaacgtggatgcggacaaagtcatgataaccaacgaagaagaaattaaaactactaacccggtagcaacggagtcctatggacaagtggccacaaaccaccagagtgcccaagcacaggcgcagaccggctgggttcaaaaccaaggaatacttccgggtatggtttggcaggacagagatgtgtacctgcaaggacccatttgggccaaaattcctcacacggacggcaactttcacccttctccgctgatgggagggtttggaatgaagcacccgcctcctcagatcctcatcaaaaacacacctgtacctgcggatcctccaacggccttcaacaaggacaagctgaactctttcatcacccagtattctactggccaagtcagcgtggagatcgagtgggagctgcagaaggaaaacagcaagcgctggaacccggagatccagtacacttccaactattacaagtctaataatgttgaatttgctgttaatactgaaggtgtatatagtgaaccccgccccattggcacgcggtatttaacgaggaactta

SEQ ID NO: 33 - DNA, 2226 bp, synthetic construct
  source 1..2226: mol_type = other DNA
atggctgccgatggttatcttccagattggctcgaggacaaccttagtgaaggaattcgcgagtggtgggctttgaaacctggagcccctcaacccaaggcaaatcaacaacatcaagacaacgctcgaggtcttgtgcttccgggttacaaataccttggacccggcaacggactcgacaagggggagccggtcaacgcagcagacgcggcggccctcgagcacgacaaggcctacgaccagcagctcaaggccggagacaacccgtacctcaagtacaaccacgccgacgccgagttccaggagcggctcaaagaagatacgtcttttgggggcaacctcgggcgagcagtcttccaggccaaaaagaggcttcttgaacctcttggtctggttgaggaagcggctaagacggctcctggaaagaagaggcctgtagagcagtctcctcaggaaccggactcctccgcgggtattggcaaatcgggtgcacagcccgctaaaaagagactcaatttcggtcagactggcgacacagagtcagtcccagaccctcaaccaatcggagaacctcccgcagccccctcaggtgtgggatctcttacaatggcttcaggtggtggcgcaccagtggcagacaataacgaaggtgccgatggagtgggtagttcctcgggaaattggcattgcgattcccaatggctgggggacagagtcatcaccaccagcacccgaacctgggccctgcccacctacaacaatcacctctacaagcaaatctccaacagcacatctggaggatcttcaaatgacaacgcctacttcggctacagcaccccctgggggtattttgacttcaacagattccactgccacttctcaccacgtgactggcagcgactcatcaacaacaactggggattccggcctaagcgactcaacttcaagctcttcaacattcaggtcaaagaggttacggacaacaatggagtcaagaccatcgccaataaccttaccagcacggtccaggtcttcacggactcagactatcagctcccgtacgtgctcgggtcggctcacgagggctgcctcccgccgttcccagcggacgttttcatgattcctcagtacgggtatctgacgcttaatgatggaagccaggccgtgggtcgttcgtccttttactgcctggaatatttcccgtcgcaaatgctaagaacgggtaacaacttccagttcagctacgagtttgagaacgtacctttccatagcagctacgctcacagccaaagcctggaccgactaatgaatccactcatcgatcagtatctgtattacttgagtaagacgtctaatggtcatgattctccgcattctaaggcgcagaatcagcagacgttgaagttttcggtagctggtcctagcaacatggctgtccagggaagaaactacatacctggacccagctaccgacaacaacgtgtctcaaccactgtgactcaaaacaacaacagcgaatttgcttggcctggagcttcttcttgggctctcaatggacgtaatagcttgatgaatcctggacctgctatggccagccacaaagaaggagaggaccgtttctttcctttgtctggatctttaatttttggcaaacaaggaactggaagagacaacgtggatgcggacaaagtcatgataaccaacgaagaagaaattaaaactactaacccggtagcaacggagtcctatggacaagtggccacaaaccaccagagtgcccaagcacaggcgcagaccggctgggttcaaaaccaaggaatacttccgggtatggtttggcaggacagagatgtgtacctgcaaggacccatttgggccaaaattcctcacacggacggcaactttcacccttctccgctgatgggagggtttggaatgaagcacccgcctcctcagatcctcatcaaaaacacacctgtacctgcggatcctccaacggccttcaacaaggacaagctgaactctttcatcacccagtattctactggccaagtcagcgtggagatcgagtgggagctgcagaaggaaaacagcaagcgctggaacccggagatccagtacacttccaactattacaagtctaataatgttgaatttgctgttaatactgaaggtgtatatagtgaaccccgccccattggcacgcggtatttaacgaggaactta

SEQ ID NO: 34 - DNA, 2226 bp, synthetic construct
  source 1..2226: mol_type = other DNA
atggctgccgatggttatcttccagattggctcgaggacaaccttagtgaaggaattcgcgagtggtgggctttgaaacctggagcccctcaacccaaggcaaatcaacaacatcaagacaacgctcgaggtcttgtgcttccgggttacaaataccttggacccggcaacggactcgacaagggggagccggtcaacgcagcagacgcggcggccctcgagcacgacaaggcctacgaccagcagctcaaggccggagacaacccgtacctcaagtacaaccacgccgacgccgagttccaggagcggctcaaagaagatacgtcttttgggggcaacctcgggcgagcagtcttccaggccaaaaagaggcttcttgaacctcttggtctggttgaggaagcggctaagacggctcctggaaagaagaggcctgtagagcagtctcctcaggaaccggactcctccgcgggtattggcaaatcgggtgcacagcccgctaaaaagagactcaatttcggtcagactggcgacacagagtcagtcccagaccctcaaccaatcggagaacctcccgcagccccctcaggtgtgggatctcttacaatggcttcaggtggtggcgcaccagtggcagacaataacgaaggtgccgatggagtgggtagttcctcgggaaattggcattgcgattcccaatggctgggggacagagtcatcaccaccagcacccgaacctgggccctgcccacctacaacaatcacctctacaagcaaatctccaacagcacatctggaggatcttcaaatgacaacgcctacttcggctacagcaccccctgggggtattttgacttcaacagattccactgccacttctcaccacgtgactggcagcgactcatcaacaacaactggggattccggcctaagcgactcaacttcaagctcttcaacattcaggtcaaagaggttacggacaacaatggagtcaagaccatcgccaataaccttaccagcacggtccaggtcttcacggactcagactatcagctcccgtacgtgctcgggtcggctcacgagggctgcctcccgccgttcccagcggacgttttcatgattcctcagtacgggtatctgacgcttaatgatggaagccaggccgtgggtcgttcgtccttttactgcctggaatatttcccgtcgcaaatgctaagaacgggtaacaacttccagttcagctacgagtttgagaacgtacctttccatagcagctacgctcacagccaaagcctggaccgactaatgaatccactcatcgatcagtatctgtattacttgagtaagacgattaatggttctggttctccgcattctctgccgtggaatcagcagacgttgaagttttcggtagctggtcctagcaacatggctgtccagggaagaaactacatacctggacccagctaccgacaacaacgtgtctcaaccactgtgactcaaaacaacaacagcgaatttgcttggcctggagcttcttcttgggctctcaatggacgtaatagcttgatgaatcctggacctgctatggccagccacaaagaaggagaggaccgtttctttcctttgtctggatctttaatttttggcaaacaaggaactggaagagacaacgtggatgcggacaaagtcatgataaccaacgaagaagaaattaaaactactaacccggtagcaacggagtcctatggacaagtggccacaaaccaccagagtgcccaagcacaggcgcagaccggctgggttcaaaaccaaggaatacttccgggtatggtttggcaggacagagatgtgtacctgcaaggacccatttgggccaaaattcctcacacggacggcaactttcacccttctccgctgatgggagggtttggaatgaagcacccgcctcctcagatcctcatcaaaaacacacctgtacctgcggatcctccaacggccttcaacaaggacaagctgaactctttcatcacccagtattctactggccaagtcagcgtggagatcgagtgggagctgcagaaggaaaacagcaagcgctggaacccggagatccagtacacttccaactattacaagtctaataatgttgaatttgctgttaatactgaaggtgtatatagtgaaccccgccccattggcacgcggtatttaacgaggaactta

SEQ ID NO: 35 - DNA, 2226 bp, synthetic construct
  source 1..2226: mol_type = other DNA
atggctgccgatggttatcttccagattggctcgaggacaaccttagtgaaggaattcgcgagtggtgggctttgaaacctggagcccctcaacccaaggcaaatcaacaacatcaagacaacgctcgaggtcttgtgcttccgggttacaaataccttggacccggcaacggactcgacaagggggagccggtcaacgcagcagacgcggcggccctcgagcacgacaaggcctacgaccagcagctcaaggccggagacaacccgtacctcaagtacaaccacgccgacgccgagttccaggagcggctcaaagaagatacgtcttttgggggcaacctcgggcgagcagtcttccaggccaaaaagaggcttcttgaacctcttggtctggttgaggaagcggctaagacggctcctggaaagaagaggcctgtagagcagtctcctcaggaaccggactcctccgcgggtattggcaaatcgggtgcacagcccgctaaaaagagactcaatttcggtcagactggcgacacagagtcagtcccagaccctcaaccaatcggagaacctcccgcagccccctcaggtgtgggatctcttacaatggcttcaggtggtggcgcaccagtggcagacaataacgaaggtgccgatggagtgggtagttcctcgggaaattggcattgcgattcccaatggctgggggacagagtcatcaccaccagcacccgaacctgggccctgcccacctacaacaatcacctctacaagcaaatctccaacagcacatctggaggatcttcaaatgacaacgcctacttcggctacagcaccccctgggggtattttgacttcaacagattccactgccacttctcaccacgtgactggcagcgactcatcaacaacaactggggattccggcctaagcgactcaacttcaagctcttcaacattcaggtcaaagaggttacggacaacaatggagtcaagaccatcgccaataaccttaccagcacggtccaggtcttcacggactcagactatcagctcccgtacgtgctcgggtcggctcacgagggctgcctcccgccgttcccagcggacgttttcatgattcctcagtacgggtatctgacgcttaatgatggaagccaggccgtgggtcgttcgtccttttactgcctggaatatttcccgtcgcaaatgctaagaacgggtaacaacttccagttcagctacgagtttgagaacgtacctttccatagcagctacgctcacagccaaagcctggaccgactaatgaatccactcatcgatcagtatctgtattacttgagtaagacgattaatggtcatgattctccgcattctaaggcgcagaatcatcagacgttgaagttttcggtagctggtcctagcaacatggctgtccagggaagaaactacatacctggacccagctaccgacaacaacgtgtctcaaccactgtgactcaaaacaacaacagcgaatttgcttggcctggagcttcttcttgggctctcaatggacgtaatagcttgatgaatcctggacctgctatggccagccacaaagaaggagaggaccgtttctttcctttgtctggatctttaatttttggcaaacaaggaactggaagagacaacgtggatgcggacaaagtcatgataaccaacgaagaagaaattaaaactactaacccggtagcaacggagtcctatggacaagtggccacaaaccaccagagtgcccaagcacaggcgcagaccggctgggttcaaaaccaaggaatacttccgggtatggtttggcaggacagagatgtgtacctgcaaggacccatttgggccaaaattcctcacacggacggcaactttcacccttctccgctgatgggagggtttggaatgaagcacccgcctcctcagatcctcatcaaaaacacacctgtacctgcggatcctccaacggccttcaacaaggacaagctgaactctttcatcacccagtattctactggccaagtcagcgtggagatcgagtgggagctgcagaaggaaaacagcaagcgctggaacccggagatccagtacacttccaactattacaagtctaataatgttgaatttgctgttaatactgaaggtgtatatagtgaaccccgccccattggcacgcggtatttaacgaggaactta

SEQ ID NO: 36 - protein, 742 aa, synthetic construct
MAADGYLPDWLEDNLSEGIREWWALKPGAPQPKANQQHQDNARGLVLPGYKYLGPGNGLDKGEPVNAADAAALEHDKAYDQQLKAGDNPYLKYNHADAEFQERLKEDTSFGGNLGRAVFQAKKRLLEPLGLVEEAAKTAPGKKRPVEQSPQEPDSSAGIGKSGAQPAKKRLNFGQTGDTESVPDPQPIGEPPAAPSGVGSLTMASGGGAPVADNNEGADGVGSSSGNWHCDSQWLGDRVITTSTRTWALPTYNNHLYKQISNSTSGGSSNDNAYFGYSTPWGYFDFNRFHCHFSPRDWQRLINNNWGFRPKRLNFKLFNIQVKEVTDNNGVKTIANNLTSTVQVFTDSDYQLPYVLGSAHEGCLPPFPADVFMIPQYGYLTLNDGSQAVGRSSFYCLEYFPSQMLRTGNNFQFSYEFENVPFHSSYAHSQSLDRLMNPLIDQYLYYLSKTERVSGSPHSKAQNQQTLKFSVAGPSNMAVQGRNYIPGPSYRQQRVSTTVTQNNNSEFAWPGASSWALNGRNSLMNPGPAMASHKEGEDRFFPLSGSLIFGKQGTGRDNVDADKVMITNEEEIKTTNPVATESYGQVATNHQSAQAQAQTGWVQNQGILPGMVWQDRDVYLQGPIWAKIPHTDGNFHPSPLMGGFGMKHPPPQILIKNTPVPADPPTAFNKDKLNSFITQYSTGQVSVEIEWELQKENSKRWNPEIQYTSNYYKSNNVEFAVNTEGVYSEPRPIGTRYLTRNL

SEQ ID NO: 37 - protein, 742 aa, synthetic construct
MAADGYLPDWLEDNLSEGIREWWALKPGAPQPKANQQHQDNARGLVLPGYKYLGPGNGLDKGEPVNAADAAALEHDKAYDQQLKAGDNPYLKYNHADAEFQERLKEDTSFGGNLGRAVFQAKKRLLEPLGLVEEAAKTAPGKKRPVEQSPQEPDSSAGIGKSGAQPAKKRLNFGQTGDTESVPDPQPIGEPPAAPSGVGSLTMASGGGAPVADNNEGADGVGSSSGNWHCDSQWLGDRVITTSTRTWALPTYNNHLYKQISNSTSGGSSNDNAYFGYSTPWGYFDFNRFHCHFSPRDWQRLINNNWGFRPKRLNFKLFNIQVKEVTDNNGVKTIANNLTSTVQVFTDSDYQLPYVLGSAHEGCLPPFPADVFMIPQYGYLTLNDGSQAVGRSSFYCLEYFPSQMLRTGNNFQFSYEFENVPFHSSYAHSQSLDRLMNPLIDQYLYYLSKAEIGHDSPHKSGQNQQTLKFSVAGPSNMAVQGRNYIPGPSYRQQRVSTTVTQNNNSEFAWPGASSWALNGRNSLMNPGPAMASHKEGEDRFFPLSGSLIFGKQGTGRDNVDADKVMITNEEEIKTTNPVATESYGQVATNHQSAQAQAQTGWVQNQGILPGMVWQDRDVYLQGPIWAKIPHTDGNFHPSPLMGGFGMKHPPPQILIKNTPVPADPPTAFNKDKLNSLITQYSTGQVSVEIEWELQKENSKRWNPEIQYTSNYYKSNNVEFAVNTEGVYSEPRPIGTRYLTRNL

SEQ ID NO: 38 - protein, 742 aa, synthetic construct
MAADGYLPDWLEDNLSEGIREWWALKPGAPQPKANQQHQDNARGLVLPGYKYLGPGNGLDKGEPVNAADAAALEHDKAYDQQLKAGDNPYLKYNHADAEFQERLKEDTSFGGNLGRAVFQAKKRLLEPLGLVEEAAKTAPGKKRPVEQSPQEPDSSAGIGKSGAQPAKKRLNFGQTGDTESVPDPQPIGEPPAAPSGVGSLTMASGGGAPVADNNEGADGVGSSSGNWHCDSQWLGDRVITTSTRTWALPTYNNHLYKQISNSTSGGSSNDNAYFGYSTPWGYFDFNRFHCHFSPRDWQRLINNNWGFRPKRLNFKLFNIQVKEVTDNNGVKTIANNLTSTVQVFTDSDYQLPYVLGSAHEGCLPPFPADVFMIPQYGYLTLNDGSQAVGRSSFYCLEYFPSQMLRTGNNFQFSYEFENVPFHSSYAHSQSLDRLMNPLIDQYLYYLSKTIIGSGSPHSKAQNRHTLKFSVAGPSNMAVQGRNYIPGPSYRQQRVSTTVTQNNNSEFAWPGASSWALNGRNSLMNPGPAMASHKEGEDRFFPLSGSLIFGKQGTGRDNVDADKVMITNEEEIKTTNPVATESYGQVATNHQSAQAQAQTGWVQNQGILPGMVWQDRDVYLQGPIWAKIPHTDGNFHPSPLMGGFGMKHPPPQILIKNTPVPADPPTAFNKDKLNSFITQYSTGQVSVEIEWELQKENSKRWNPEIQYTSNYYKSNNVEFAVNTEGVYSEPRPIGTRYLTRNL

SEQ ID NO: 39 - protein, 742 aa, synthetic construct
MAADGYLPDWLEDNLSEGIREWWALKPGAPQPKANQQHQDNARGLVLPGYKYLGPGNGLDKGEPVNAADAAALEHDKAYDQQLKAGDNPYLKYNHADAEFQERLKEDTSFGGNLGRAVFQAKKRLLEPLGLVEEAAKTAPGKKRPVEQSPQEPDSSAGIGKSGAQPAKKRLNFGQTGDTESVPDPQPIGEPPAAPSGVGSLTMASGGGAPVADNNEGADGVGSSSGNWHCDSQWLGDRVITTSTRTWALPTYNNHLYKQISNSTSGGSSNDNAYFGYSTPWGYFDFNRFHCHFSPRDWQRLINNNWGFRPKRLNFKLFNIQVKEVTDNNGVKTIANNLTSTVQVFTDSDYQLPYVLGSAHEGCLPPFPADVFMIPQYGYLTLNDGSQAVGRSSFYCLEYFPSQMLRTGNNFQFSYEFENVPFHSSYAHSQSLDRLMNPLIDQYLYYLSKTEKMSGSPHSKAQNQQTLKFSVAGPSNMAVQGRNYIPGPSYRQQRVSTTVTQNNNSEFAWPGASSWALNGRNSLMNPGPAMASHKEGEDRFFPLSGSLIFGKQGTGRDNVDADKVMITNEEEIKTTNPVATESYGQVATNHQSAQAQAQTGWVQNQGILPGMVWQDRDVYLQGPIWAKIPHTDGNFHPSPLMGGFGMKHPPPQILIKNTPVPADPPTAFNKDKLNSFITQYSTGQVSVEIEWELQKENSKRWNPEIQYTSNYYKSNNVEFAVNTEGVYSEPRPIGTRYLTRNL

SEQ ID NO: 40 - protein, 742 aa, synthetic construct
MAADGYLPDWLEDNLSEGIREWWALKPGAPQPKANQQHQDNARGLVLPGYKYLGPGNGLDKGEPVNAADAAALEHDKAYDQQLKAGDNPYLKYNHADAEFQERLKEDTSFGGNLGRAVFQAKKRLLEPLGLVEEAAKTAPGKKRPVEQSPQEPDSSAGIGKSGAQPAKKRLNFGQTGDTESVPDPQPIGEPPAAPSGVGSLTMASGGGAPVADNNEGADGVGSSSGNWHCDSQWLGDRVITTSTRTWALPTYNNHLYKQISNSTSGGSSNDNAYFGYSTPWGYFDFNRFHCHFSPRDWQRLINNNWGFRPKRLNFKLFNIQVKEVTDNNGVKTIANNLTSTVQVFTDSDYQLPYVLGSAHEGCLPPFPADVFMIPQYGYLTLNDGSQAVGRSSFYCLEYFPSQMLRTGNNFQFSYEFENVPFHSSYAHSQSLDRLMNPLIDQYLYYLSKEINGRGSPHSKAQNQQTLKFSVAGPSNMAVQGRNYIPGPSYRQQRVSTTVTQNNNSEFAWPGASSWALNGRNSLMNPGPAMASHKEGEDRFFPLSGSLIFGKQGTGRDNVDADKVMITNEEEIKTTNPVATESYGQVATNHQSAQAQAQTGWVQNQGILPGMVWQDRDVYLQGPIWAKIPHTDGNFHPSPLMGGFGMKHPPPQILIKNTPVPADPPTAFNKDKLNSFITQYSTGQVSVEIEWELQKENSKRWNPEIQYTSNYYKSNNVEFAVNTEGVYSEPRPIGTRYLTRNL

SEQ ID NO: 41 - protein, 742 aa, synthetic construct
MAADGYLPDWLEDNLSEGIREWWALKPGAPQPKANQQHQDNARGLVLPGYKYLGPGNGLDKGEPVNAADAAALEHDKAYDQQLKAGDNPYLKYNHADAEFQERLKEDTSFGGNLGRAVFQAKKRLLEPLGLVEEAAKTAPGKKRPVEQSPQEPDSSAGIGKSGAQPAKKRLNFGQTGDTESVPDPQPIGEPPAAPSGVGSLTMASGGGAPVADNNEGADGVGSSSGNWHCDSQWLGDRVITTSTRTWALPTYNNHLYKQISNSTSGGSSNDNAYFGYSTPWGYFDFNRFHCHFSPRDWQRLINNNWGFRPKRLNFKLFNIQVKEVTDNNGVKTIANNLTSTVQVFTDSDYQLPYVLGSAHEGCLPPFPADVFMIPQYGYLTLNDGSQAVGRSSFYCLEYFPSQMLRTGNNFQFSYEFENVPFHSSYAHSQSLDRLMNPLIDQYLYYLSKTFNGSGSPHSKAPNLQTLKFSVAGPSNMAVQGRNYIPGPSYRQQRVSTTVTQNNNSEFAWPGASSWALNGRNSLMNPGPAMASHKEGEDRFFPLSGSLIFGKQGTGRDNVDADKVMITNEEEIKTTNPVATESYGQVATNHQSAQAQAQTGWVQNQGILPGMVWQDRDVYLQGPIWAKIPHTDGNFHPSPLMGGFGMKHPPPQILIKNTPVPADPPTAFNKDKLNSFITQYSTGQVSVEIEWELQKENSKRWNPEIQYTSNYYKSNNVEFAVNTEGVYSEPRPIGTRYLTRNL

SEQ ID NO: 42 - protein, 742 aa, synthetic construct
MAADGYLPDWLEDNLSEGIREWWALKPGAPQPKANQQHQDNARGLVLPGYKYLGPGNGLDKGEPVNAADAAALEHDKAYDQQLKAGDNPYLKYNHADAEFQERLKEDTSFGGNLGRAVFQAKKRLLEPLGLVEEAAKTAPGKKRPVEQSPQEPDSSAGIGKSGAQPAKKRLNFGQTGDTESVPDPQPIGEPPAAPSGVGSLTMASGGGAPVADNNEGADGVGSSSGNWHCDSQWLGDRVITTSTRTWALPTYNNHLYKQISNSTSGGSSNDNAYFGYSTPWGYFDFNRFHCHFSPRDWQRLINNNWGFRPKRLNFKLFNIQVKEVTDNNGVKTIANNLTSTVQVFTDSDYQLPYVLGSAHEGCLPPFPADVFMIPQYGYLTLNDGSQAVGRSSFYCLEYFPSQMLRTGNNFQFSYEFENVPFHSSYAHSQSLDRLMNPLIDQYLYYLSKTEKTSGSPHSKAQNQQTLKFSVAGPSNMAVQGRNYIPGPSYRQQRVSTTVTQNNNSEFAWPGASSWALNGRNSLMNPGPAMASHKEGEDRFFPLSGSLIFGKQGTGRDNVDADKVMITNEEEIKTTNPVATESYGQVATNHQSAQAQAQTGWVQNQGILPGMVWQDRDVYLQGPIWAKIPHTDGNFHPSPLMGGFGMKHPPPQILIKNTPVPADPPTAFNKDKLNSFITQYSTGQVSVEIEWELQKENSKRWNPEIQYTSNYYKSNNVEFAVNTEGVYSEPRPIGTRYLTRNL

SEQ ID NO: 43 - protein, 742 aa, synthetic construct
MAADGYLPDWLEDNLSEGIREWWALKPGAPQPKANQQHQDNARGLVLPGYKYLGPGNGLDKGEPVNAADAAALEHDKAYDQQLKAGDNPYLKYNHADAEFQERLKEDTSFGGNLGRAVFQAKKRLLEPLGLVEEAAKTAPGKKRPVEQSPQEPDSSAGIGKSGAQPAKKRLNFGQTGDTESVPDPQPIGEPPAAPSGVGSLTMASGGGAPVADNNEGADGVGSSSGNWHCDSQWLGDRVITTSTRTWALPTYNNHLYKQISNSTSGGSSNDNAYFGYSTPWGYFDFNRFHCHFSPRDWQRLINNNWGFRPKRLNFKLFNIQVKEVTDNNGVKTIANNLTSTVQVFTDSDYQLPYVLGSAHEGCLPPFPADVFMIPQYGYLTLNDGSQAVGRSSFYCLEYFPSQMLRTGNNFQFSYEFENVPFHSSYAHSQSLDRLMNPLIDQYLYYLSKTMNGHDSPHSKAQNQQTLKFSVAGPSNMAVQGRNYIPGPSYRQQRVSTTVTQNNNSEFAWPGASSWALNGRNSLMNPGPAMASHKEGEDRFFPLSGSLIFGKQGTGRDNVDADKVMITNEEEIKTTNPVATESYGQVATNHQSAQAQAQTGWVQNQGILPGMVWQDRDVYLQGPIWAKIPHTDGNFHPSPLMGGFGMKHPPPQILIKNTPVPADPPTAFNKDKLNSFITQYSTGQVSVEIEWELQKENSKRWNPEIQYTSNYYKSNNVEFAVNTEGVYSEPRPIGTRYLTRNL

SEQ ID NO: 44 - protein, 742 aa, synthetic construct
MAADGYLPDWLEDNLSEGIREWWALKPGAPQPKANQQHQDNARGLVLPGYKYLGPGNGLDKGEPVNAADAAALEHDKAYDQQLKAGDNPYLKYNHADAEFQERLKEDTSFGGNLGRAVFQAKKRLLEPLGLVEEAAKTAPGKKRPVEQSPQEPDSSAGIGKSGAQPAKKRLNFGQTGDTESVPDPQPIGEPPAAPSGVGSLTMASGGGAPVADNNEGADGVGSSSGNWHCDSQWLGDRVITTSTRTWALPTYNNHLYKQISNSTSGGSSNDNAYFGYSTPWGYFDFNRFHCHFSPRDWQRLINNNWGFRPKRLNFKLFNIQVKEVTDNNGVKTIANNLTSTVQVFTDSDYQLPYVLGSAHEGCLPPFPADVFMIPQYGYLTLNDGSQAVGRSSFYCLEYFPSQMLRTGNNFQFSYEFENVPFHSSYAHSQSLDRLMNPLIDQYLYYLSKTIDGHDSPHSKAQNQQTLKFSVAGPSNMAVQGRNYIPGPSYRQQRVSTTVTQNNNSEFAWPGASSWALNGRNSLMNPGPAMASHKEGEDRFFPLSGSLIFGKQGTGRDNVDADKVMITNEEEIKTTNPVATESYGQVATNHQSAQAQAQTGWVQNQGILPGMVWQDRDVYLQGPIWAKIPHTDGNFHPSPLMGGFGMKHPPPQILIKNTPVPADPPTAFNKDKLNSFITQYSTGQVSVEIEWELQKENSKRWNPEIQYTSNYYKSNNVEFAVNTEGVYSEPRPIGTRYLTRNL

SEQ ID NO: 45 - protein, 742 aa, synthetic construct
MAADGYLPDWLEDNLSEGIREWWALKPGAPQPKANQQHQDNARGLVLPGYKYLGPGNGLDKGEPVNAADAAALEHDKAYDQQLKAGDNPYLKYNHADAEFQERLKEDTSFGGNLGRAVFQAKKRLLEPLGLVEEAAKTAPGKKRPVEQSPQEPDSSAGIGKSGAQPAKKRLNFGQTGDTESVPDPQPIGEPPAAPSGVGSLTMASGGGAPVADNNEGADGVGSSSGNWHCDSQWLGDRVITTSTRTWALPTYNNHLYKQISNSTSGGSSNDNAYFGYSTPWGYFDFNRFHCHFSPRDWQRLINNNWGFRPKRLNFKLFNIQVKEVTDNNGVKTIANNLTSTVQVFTDSDYQLPYVLGSAHEGCLPPFPADVFMIPQYGYLTLNDGSQAVGRSSFYCLEYFPSQMLRTGNNFQFSYEFENVPFHSSYAHSQSLDRLMNPLIDQYLYYLSKTNNGHDSPHSKAQNQQTLKFSVAGPSNMAVQGRNYIPGPSYRQQRVSTTVTQNNNSEFAWPGASSWALNGRNSLMNPGPAMASHKEGEDRFFPLSGSLIFGKQGTGRDNVDADKVMITNEEEIKTTNPVATESYGQVATNHQSAQAQAQTGWVQNQGILPGMVWQDRDVYLQGPIWAKIPHTDGNFHPSPLMGGFGMKHPPPQILIKNTPVPADPPTAFNKDKLNSFITQYSTGQVSVEIEWELQKENSKRWNPEIQYTSNYYKSNNVEFAVNTEGVYSEPRPIGTRYLTRNL

SEQ ID NO: 46 - protein, 742 aa, synthetic construct
MAADGYLPDWLEDNLSEGIREWWALKPGAPQPKANQQHQDNARGLVLPGYKYLGPGNGLDKGEPVNAADAAALEHDKAYDQQLKAGDNPYLKYNHADAEFQERLKEDTSFGGNLGRAVFQAKKRLLEPLGLVEEAAKTAPGKKRPVEQSPQEPDSSAGIGKSGAQPAKKRLNFGQTGDTESVPDPQPIGEPPAAPSGVGSLTMASGGGAPVADNNEGADGVGSSSGNWHCDSQWLGDRVITTSTRTWALPTYNNHLYKQISNSTSGGSSNDNAYFGYSTPWGYFDFNRFHCHFSPRDWQRLINNNWGFRPKRLNFKLFNIQVKEVTDNNGVKTIANNLTSTVQVFTDSDYQLPYVLGSAHEGCLPPFPADVFMIPQYGYLTLNDGSQAVGRSSFYCLEYFPSQMLRTGNNFQFSYEFENVPFHSSYAHSQSLDRLMNPLIDQYLYYLSKTQRKSGSPHSKAQNQQTLKFSVAGPSNMAVQGRNYIPGPSYRQQRVSTTVTQNNNSEFAWPGASSWALNGRNSLMNPGPAMASHKEGEDRFFPLSGSLIFGKQGTGRDNVDADKVMITNEEEIKTTNPVATESYGQVATNHQSAQAQAQTGWVQNQGILPGMVWQDRDVYLQGPIWAKIPHTDGNFHPSPLMGGFGMKHPPPQILIKNTPVPADPPTAFNKDKLNSFITQYSTGQVSVEIEWELQKENSKRWNPEIQYTSNYYKSNNVEFAVNTEGVYSEPRPIGTRYLTRNL

SEQ ID NO: 47 - protein, 742 aa, synthetic construct
MAADGYLPDWLEDNLSEGIREWWALKPGAPQPKANQQHQDNARGLVLPGYKYLGPGNGLDKGEPVNAADAAALEHDKAYDQQLKAGDNPYLKYNHADAEFQERLKEDTSFGGNLGRAVFQAKKRLLEPLGLVEEAAKTAPGKKRPVEQSPQEPDSSAGIGKSGAQPAKKRLNFGQTGDTESVPDPQPIGEPPAAPSGVGSLTMASGGGAPVADNNEGADGVGSSSGNWHCDSQWLGDRVITTSTRTWALPTYNNHLYKQISNSTSGGSSNDNAYFGYSTPWGYFDFNRFHCHFSPRDWQRLINNNWGFRPKRLNFKLFNIQVKEVTDNNGVKTIANNLTSTVQVFTDSDYQLPYVLGSAHEGCLPPFPADVFMIPQYGYLTLNDGSQAVGRSSFYCLEYFPSQMLRTGNNFQFSYEFENVPFHSSYAHSQSLDRLMNPLIDQYLYYLSKTINGSGSPHSKAQARKTLKFSVAGPSNMAVQGRNYIPGPSYRQQRVSTTVTQNNNSEFAWPGASSWALNGRNSLMNPGPAMASHKEGEDRFFPLSGSLIFGKQGTGRDNVDADKVMITNEEEIKTTNPVATESYGQVATNHQSAQAQAQTGWVQNQGILPGMVWQDRDVYLQGPIWAKIPHTDGNFHPSPLMGGFGMKHPPPQILIKNTPVPADPPTAFNKDKLNSFITQYSTGQVSVEIEWELQKENSKRWNPEIQYTSNYYKSNNVEFAVNTEGVYSEPRPIGTRYLTRNL

SEQ ID NO: 48 - protein, 742 aa, synthetic construct
MAADGYLPDWLEDNLSEGIREWWALKPGAPQPKANQQHQDNARGLVLPGYKYLGPGNGLDKGEPVNAADAAALEHDKAYDQQLKAGDNPYLKYNHADAEFQERLKEDTSFGGNLGRAVFQAKKRLLEPLGLVEEAAKTAPGKKRPVEQSPQEPDSSAGIGKSGAQPAKKRLNFGQTGDTESVPDPQPIGEPPAAPSGVGSLTMASGGGAPVADNNEGADGVGSSSGNWHCDSQWLGDRVITTSTRTWALPTYNNHLYKQISNSTSGGSSNDNAYFGYSTPWGYFDFNRFHCHFSPRDWQRLINNNWGFRPKRLNFKLFNIQVKEVTDNNGVKTIANNLTSTVQVFTDSDYQLPYVLGSAHEGCLPPFPADVFMIPQYGYLTLNDGSQAVGRSSFYCLEYFPSQMLRTGNNFQFSYEFENVPFHSSYAHSQSLDRLMNPLIDQYLYYLSKYIVGSGSPHSKAQNQQTLKFSVAGPSNMAVQGRNYIPGPSYRQQRVSTTVTQNNNSEFAWPGASSWALNGRNSLMNPGPAMASHKEGEDRFFPLSGSLIFGKQGTGRDNVDADKVMITNEEEIKTTNPVATESYGQVATNHQSAQAQAQTGWVQNQGILPGMVWQDRDVYLQGPIWAKIPHTDGNFHPSPLMGGFGMKHPPPQILIKNTPVPADPPTAFNKDKLNSFITQYSTGQVSVEIEWELQKENSKRWNPEIQYTSNYYKSNNVEFAVNTEGVYSEPRPIGTRYLTRNL

SEQ ID NO: 49 - protein, 742 aa, synthetic construct
MAADGYLPDWLEDNLSEGIREWWALKPGAPQPKANQQHQDNARGLVLPGYKYLGPGNGLDKGEPVNAADAAALEHDKAYDQQLKAGDNPYLKYNHADAEFQERLKEDTSFGGNLGRAVFQAKKRLLEPLGLVEEAAKTAPGKKRPVEQSPQEPDSSAGIGKSGAQPAKKRLNFGQTGDTESVPDPQPIGEPPAAPSGVGSLTMASGGGAPVADNNEGADGVGSSSGNWHCDSQWLGDRVITTSTRTWALPTYNNHLYKQISNSTSGGSSNDNAYFGYSTPWGYFDFNRFHCHFSPRDWQRLINNNWGFRPKRLNFKLFNIQVKEVTDNNGVKTIANNLTSTVQVFTDSDYQLPYVLGSAHEGCLPPFPADVFMIPQYGYLTLNDGSQAVGRSSFYCLEYFPSQMLRTGNNFQFSYEFENVPFHSSYAHSQSLDRLMNPLIDQYLYYLSKTISKRGSPHSKAQNQQTLKFSVAGPSNMAVQGRNYIPGPSYRQQRVSTTVTQNNNSEFAWPGASSWALNGRNSLMNPGPAMASHKEGEDRFFPLSGSLIFGKQGTGRDNVDADKVMITNEEEIKTTNPVATESYGQVATNHQSAQAQAQTGWVQNQGILPGMVWQDRDVYLQGPIWAKIPHTDGNFHPSPLMGGFGMKHPPPQILIKNTPVPADPPTAFNKDKLNSFITQYSTGQVSVEIEWELQKENSKRWNPEIQYTSNYYKSNNVEFAVNTEGVYSEPRPIGTRYLTRNL

SEQ ID NO: 50 - protein, 742 aa, synthetic construct
MAADGYLPDWLEDNLSEGIREWWALKPGAPQPKANQQHQDNARGLVLPGYKYLGPGNGLDKGEPVNAADAAALEHDKAYDQQLKAGDNPYLKYNHADAEFQERLKEDTSFGGNLGRAVFQAKKRLLEPLGLVEEAAKTAPGKKRPVEQSPQEPDSSAGIGKSGAQPAKKRLNFGQTGDTESVPDPQPIGEPPAAPSGVGSLTMASGGGAPVADNNEGADGVGSSSGNWHCDSQWLGDRVITTSTRTWALPTYNNHLYKQISNSTSGGSSNDNAYFGYSTPWGYFDFNRFHCHFSPRDWQRLINNNWGFRPKRLNFKLFNIQVKEVTDNNGVKTIANNLTSTVQVFTDSDYQLPYVLGSAHEGCLPPFPADVFMIPQYGYLTLNDGSQAVGRSSFYCLEYFPSQMLRTGNNFQFSYEFENVPFHSSYAHSQSLDRLMNPLIDQYLYYLSKGLGGSGSPHSKAQNQQTLKFSVAGPSNMAVQGRNYIPGPSYRQQRVSTTVTQNNNSEFAWPGASSWALNGRNSLMNPGPAMASHKEGEDRFFPLSGSLIFGKQGTGRDNVDADKVMITNEEEIKTTNPVATESYGQVATNHQSAQAQAQTGWVQNQGILPGMVWQDRDVYLQGPIWAKIPHTDGNFHPSPLMGGFGMKHPPPQILIKNTPVPADPPTAFNKDKLNSFITQYSTGQVSVEIEWELQKENSKRWNPEIQYTSNYYKSNNVEFAVNTEGVYSEPRPIGTRYLTRNL

SEQ ID NO: 51 - protein, 742 aa, synthetic construct
MAADGYLPDWLEDNLSEGIREWWALKPGAPQPKANQQHQDNARGLVLPGYKYLGPGNGLDKGEPVNAADAAALEHDKAYDQQLKAGDNPYLKYNHADAEFQERLKEDTSFGGNLGRAVFQAKKRLLEPLGLVEEAAKTAPGKKRPVEQSPQEPDSSAGIGKSGAQPAKKRLNFGQTGDTESVPDPQPIGEPPAAPSGVGSLTMASGGGAPVADNNEGADGVGSSSGNWHCDSQWLGDRVITTSTRTWALPTYNNHLYKQISNSTSGGSSNDNAYFGYSTPWGYFDFNRFHCHFSPRDWQRLINNNWGFRPKRLNFKLFNIQVKEVTDNNGVKTIANNLTSTVQVFTDSDYQLPYVLGSAHEGCLPPFPADVFMIPQYGYLTLNDGSQAVGRSSFYCLEYFPSQMLRTGNNFQFSYEFENVPFHSSYAHSQSLDRLMNPLIDQYLYYLSKTINGHDSPHSKAQNLQTLKFSVAGPSNMAVQGRNYIPGPSYRQQRVSTTVTQNNNSEFAWPGASSWALNGRNSLMNPGPAMASHKEGEDRFFPLSGSLIFGKQGTGRDNVDADKVMITNEEEIKTTNPVATESYGQVATNHQSAQAQAQTGWVQNQGILPGMVWQDRDVYLQGPIWAKIPHTDGNFHPSPLMGGFGMKHPPPQILIKNTPVPADPPTAFNKDKLNSFITQYSTGQVSVEIEWELQKENSKRWNPEIQYTSNYYKSNNVEFAVNTEGVYSEPRPIGTRYLTRNL

SEQ ID NO: 52 - protein, 742 aa, synthetic construct
MAADGYLPDWLEDNLSEGIREWWALKPGAPQPKANQQHQDNARGLVLPGYKYLGPGNGLDKGEPVNAADAAALEHDKAYDQQLKAGDNPYLKYNHADAEFQERLKEDTSFGGNLGRAVFQAKKRLLEPLGLVEEAAKTAPGKKRPVEQSPQEPDSSAGIGKSGAQPAKKRLNFGQTGDTESVPDPQPIGEPPAAPSGVGSLTMASGGGAPVADNNEGADGVGSSSGNWHCDSQWLGDRVITTSTRTWALPTYNNHLYKQISNSTSGGSSNDNAYFGYSTPWGYFDFNRFHCHFSPRDWQRLINNNWGFRPKRLNFKLFNIQVKEVTDNNGVKTIANNLTSTVQVFTDSDYQLPYVLGSAHEGCLPPFPADVFMIPQYGYLTLNDGSQAVGRSSFYCLEYFPSQMLRTGNNFQFSYEFENVPFHSSYAHSQSLDRLMNPLIDQYLYYLSKTVNGHDSPHSKAQNQQTLKFSVAGPSNMAVQGRNYIPGPSYRQQRVSTTVTQNNNSEFAWPGASSWALNGRNSLMNPGPAMASHKEGEDRFFPLSGSLIFGKQGTGRDNVDADKVMITNEEEIKTTNPVATESYGQVATNHQSAQAQAQTGWVQNQGILPGMVWQDRDVYLQGPIWAKIPHTDGNFHPSPLMGGFGMKHPPPQILIKNTPVPADPPTAFNKDKLNSFITQYSTGQVSVEIEWELQKENSKRWNPEIQYTSNYYKSNNVEFAVNTEGVYSEPRPIGTRYLTRNL

SEQ ID NO: 53 - protein, 742 aa, synthetic construct
MAADGYLPDWLEDNLSEGIREWWALKPGAPQPKANQQHQDNARGLVLPGYKYLGPGNGLDKGEPVNAADAAALEHDKAYDQQLKAGDNPYLKYNHADAEFQERLKEDTSFGGNLGRAVFQAKKRLLEPLGLVEEAAKTAPGKKRPVEQSPQEPDSSAGIGKSGAQPAKKRLNFGQTGDTESVPDPQPIGEPPAAPSGVGSLTMASGGGAPVADNNEGADGVGSSSGNWHCDSQWLGDRVITTSTRTWALPTYNNHLYKQISNSTSGGSSNDNAYFGYSTPWGYFDFNRFHCHFSPRDWQRLINNNWGFRPKRLNFKLFNIQVKEVTDNNGVKTIANNLTSTVQVFTDSDYQLPYVLGSAHEGCLPPFPADVFMIPQYGYLTLNDGSQAVGRSSFYCLEYFPSQMLRTGNNFQFSYEFENVPFHSSYAHSQSLDRLMNPLIDQYLYYLSKTINGHDSPHSKALNQQTLKFSVAGPSNMAVQGRNYIPGPSYRQQRVSTTVTQNNNSEFAWPGASSWALNGRNSLMNPGPAMASHKEGEDRFFPLSGSLIFGKQGTGRDNVDADKVMITNEEEIKTTNPVATESYGQVATNHQSAQAQAQTGWVQNQGILPGMVWQDRDVYLQGPIWAKIPHTDGNFHPSPLMGGFGMKHPPPQILIKNTPVPADPPTAFNKDKLNSFITQYSTGQVSVEIEWELQKENSKRWNPEIQYTSNYYKSNNVEFAVNTEGVYSEPRPIGTRYLTRNL

SEQ ID NO: 54 - protein, 742 aa, synthetic construct
MAADGYLPDWLEDNLSEGIREWWALKPGAPQPKANQQHQDNARGLVLPGYKYLGPGNGLDKGEPVNAADAAALEHDKAYDQQLKAGDNPYLKYNHADAEFQERLKEDTSFGGNLGRAVFQAKKRLLEPLGLVEEAAKTAPGKKRPVEQSPQEPDSSAGIGKSGAQPAKKRLNFGQTGDTESVPDPQPIGEPPAAPSGVGSLTMASGGGAPVADNNEGADGVGSSSGNWHCDSQWLGDRVITTSTRTWALPTYNNHLYKQISNSTSGGSSNDNAYFGYSTPWGYFDFNRFHCHFSPRDWQRLINNNWGFRPKRLNFKLFNIQVKEVTDNNGVKTIANNLTSTVQVFTDSDYQLPYVLGSAHEGCLPPFPADVFMIPQYGYLTLNDGSQAVGRSSFYCLEYFPSQMLRTGNNFQFSYEFENVPFHSSYAHSQSLDRLMNPLIDQYLYYLSKTINGHDSPHSKAQNQQSLKFSVAGPSNMAVQGRNYIPGPSYRQQRVSTTVTQNNNSEFAWPGASSWALNGRNSLMNPGPAMASHKEGEDRFFPLSGSLIFGKQGTGRDNVDADKVMITNEEEIKTTNPVATESYGQVATNHQSAQAQAQTGWVQNQGILPGMVWQDRDVYLQGPIWAKIPHTDGNFHPSPLMGGFGMKHPPPQILIKNTPVPADPPTAFNKDKLNSFITQYSTGQVSVEIEWELQKENSKRWNPEIQYTSNYYKSNNVEFAVNTEGVYSEPRPIGTRYLTRNL

SEQ ID NO: 55 - protein, 742 aa, synthetic construct
MAADGYLPDWLEDNLSEGIREWWALKPGAPQPKANQQHQDNARGLVLPGYKYLGPGNGLDKGEPVNAADAAALEHDKAYDQQLKAGDNPYLKYNHADAEFQERLKEDTSFGGNLGRAVFQAKKRLLEPLGLVEEAAKTAPGKKRPVEQSPQEPDSSAGIGKSGAQPAKKRLNFGQTGDTESVPDPQPIGEPPAAPSGVGSLTMASGGGAPVADNNEGADGVGSSSGNWHCDSQWLGDRVITTSTRTWALPTYNNHLYKQISNSTSGGSSNDNAYFGYSTPWGYFDFNRFHCHFSPRDWQRLINNNWGFRPKRLNFKLFNIQVKEVTDNNGVKTIANNLTSTVQVFTDSDYQLPYVLGSAHEGCLPPFPADVFMIPQYGYLTLNDGSQAVGRSSFYCLEYFPSQMLRTGNNFQFSYEFENVPFHSSYAHSQSLDRLMNPLIDQYLYYLSKTINGHDSPHSKAQNQQILKFSVAGPSNMAVQGRNYIPGPSYRQQRVSTTVTQNNNSEFAWPGASSWALNGRNSLMNPGPAMASHKEGEDRFFPLSGSLIFGKQGTGRDNVDADKVMITNEEEIKTTNPVATESYGQVATNHQSAQAQAQTGWVQNQGILPGMVWQDRDVYLQGPIWAKIPHTDGNFHPSPLMGGFGMKHPPPQILIKNTPVPADPPTAFNKDKLNSFITQYSTGQVSVEIEWELQKENSKRWNPEIQYTSNYYKSNNVEFAVNTEGVYSEPRPIGTRYLTRNL

SEQ ID NO: 56 - protein, 742 aa, synthetic construct
MAADGYLPDWLEDNLSEGIREWWALKPGAPQPKANQQHQDNARGLVLPGYKYLGPGNGLDKGEPVNAADAAALEHDKAYDQQLKAGDNPYLKYNHADAEFQERLKEDTSFGGNLGRAVFQAKKRLLEPLGLVEEAAKTAPGKKRPVEQSPQEPDSSAGIGKSGAQPAKKRLNFGQTGDTESVPDPQPIGEPPAAPSGVGSLTMASGGGAPVADNNEGADGVGSSSGNWHCDSQWLGDRVITTSTRTWALPTYNNHLYKQISNSTSGGSSNDNAYFGYSTPWGYFDFNRFHCHFSPRDWQRLINNNWGFRPKRLNFKLFNIQVKEVTDNNGVKTIANNLTSTVQVFTDSDYQLPYVLGSAHEGCLPPFPADVFMIPQYGYLTLNDGSQAVGRSSFYCLEYFPSQMLRTGNNFQFSYEFENVPFHSSYAHSQSLDRLMNPLIDQYLYYLSKTINGSGSPHFTRQNQQTLKFSVAGPSNMAVQGRNYIPGPSYRQQRVSTTVTQNNNSEFAWPGASSWALNGRNSLMNPGPAMASHKEGEDRFFPLSGSLIFGKQGTGRDNVDADKVMITNEEEIKTTNPVATESYGQVATNHQSAQAQAQTGWVQNQGILPGMVWQDRDVYLQGPIWAKIPHTDGNFHPSPLMGGFGMKHPPPQILIKNTPVPADPPTAFNKDKLNSFITQYSTGQVSVEIEWELQKENSKRWNPEIQYTSNYYKSNNVEFAVNTEGVYSEPRPIGTRYLTRNL

SEQ ID NO: 57 - protein, 742 aa, synthetic construct
MAADGYLPDWLEDNLSEGIREWWALKPGAPQPKANQQHQDNARGLVLPGYKYLGPGNGLDKGEPVNAADAAALEHDKAYDQQLKAGDNPYLKYNHADAEFQERLKEDTSFGGNLGRAVFQAKKRLLEPLGLVEEAAKTAPGKKRPVEQSPQEPDSSAGIGKSGAQPAKKRLNFGQTGDTESVPDPQPIGEPPAAPSGVGSLTMASGGGAPVADNNEGADGVGSSSGNWHCDSQWLGDRVITTSTRTWALPTYNNHLYKQISNSTSGGSSNDNAYFGYSTPWGYFDFNRFHCHFSPRDWQRLINNNWGFRPKRLNFKLFNIQVKEVTDNNGVKTIANNLTSTVQVFTDSDYQLPYVLGSAHEGCLPPFPADVFMIPQYGYLTLNDGSQAVGRSSFYCLEYFPSQMLRTGNNFQFSYEFENVPFHSSYAHSQSLDRLMNPLIDQYLYYLSKTSNGHDSPHSKAQNQQTLKFSVAGPSNMAVQGRNYIPGPSYRQQRVSTTVTQNNNSEFAWPGASSWALNGRNSLMNPGPAMASHKEGEDRFFPLSGSLIFGKQGTGRDNVDADKVMITNEEEIKTTNPVATESYGQVATNHQSAQAQAQTGWVQNQGILPGMVWQDRDVYLQGPIWAKIPHTDGNFHPSPLMGGFGMKHPPPQILIKNTPVPADPPTAFNKDKLNSFITQYSTGQVSVEIEWELQKENSKRWNPEIQYTSNYYKSNNVEFAVNTEGVYSEPRPIGTRYLTRNL

SEQ ID NO: 58 - protein, 742 aa, synthetic construct
MAADGYLPDWLEDNLSEGIREWWALKPGAPQPKANQQHQDNARGLVLPGYKYLGPGNGLDKGEPVNAADAAALEHDKAYDQQLKAGDNPYLKYNHADAEFQERLKEDTSFGGNLGRAVFQAKKRLLEPLGLVEEAAKTAPGKKRPVEQSPQEPDSSAGIGKSGAQPAKKRLNFGQTGDTESVPDPQPIGEPPAAPSGVGSLTMASGGGAPVADNNEGADGVGSSSGNWHCDSQWLGDRVITTSTRTWALPTYNNHLYKQISNSTSGGSSNDNAYFGYSTPWGYFDFNRFHCHFSPRDWQRLINNNWGFRPKRLNFKLFNIQVKEVTDNNGVKTIANNLTSTVQVFTDSDYQLPYVLGSAHEGCLPPFPADVFMIPQYGYLTLNDGSQAVGRSSFYCLEYFPSQMLRTGNNFQFSYEFENVPFHSSYAHSQSLDRLMNPLIDQYLYYLSKTINGSGSPHSLPWNQQTLKFSVAGPSNMAVQGRNYIPGPSYRQQRVSTTVTQNNNSEFAWPGASSWALNGRNSLMNPGPAMASHKEGEDRFFPLSGSLIFGKQGTGRDNVDADKVMITNEEEIKTTNPVATESYGQVATNHQSAQAQAQTGWVQNQGILPGMVWQDRDVYLQGPIWAKIPHTDGNFHPSPLMGGFGMKHPPPQILIKNTPVPADPPTAFNKDKLNSFITQYSTGQVSVEIEWELQKENSKRWNPEIQYTSNYYKSNNVEFAVNTEGVYSEPRPIGTRYLTRNL

SEQ ID NO: 59 - protein, 742 aa, synthetic construct
MAADGYLPDWLEDNLSEGIREWWALKPGAPQPKANQQHQDNARGLVLPGYKYLGPGNGLDKGEPVNAADAAALEHDKAYDQQLKAGDNPYLKYNHADAEFQERLKEDTSFGGNLGRAVFQAKKRLLEPLGLVEEAAKTAPGKKRPVEQSPQEPDSSAGIGKSGAQPAKKRLNFGQTGDTESVPDPQPIGEPPAAPSGVGSLTMASGGGAPVADNNEGADGVGSSSGNWHCDSQWLGDRVITTSTRTWALPTYNNHLYKQISNSTSGGSSNDNAYFGYSTPWGYFDFNRFHCHFSPRDWQRLINNNWGFRPKRLNFKLFNIQVKEVTDNNGVKTIANNLTSTVQVFTDSDYQLPYVLGSAHEGCLPPFPADVFMIPQYGYLTLNDGSQAVGRSSFYCLEYFPSQMLRTGNNFQFSYEFENVPFHSSYAHSQSLDRLMNPLIDQYLYYLSKTINGHDSPHSKAQNHQTLKFSVAGPSNMAVQGRNYIPGPSYRQQRVSTTVTQNNNSEFAWPGASSWALNGRNSLMNPGPAMASHKEGEDRFFPLSGSLIFGKQGTGRDNVDADKVMITNEEEIKTTNPVATESYGQVATNHQSAQAQAQTGWVQNQGILPGMVWQDRDVYLQGPIWAKIPHTDGNFHPSPLMGGFGMKHPPPQILIKNTPVPADPPTAFNKDKLNSFITQYSTGQVSVEIEWELQKENSKRWNPEIQYTSNYYKSNNVEFAVNTEGVYSEPRPIGTRYLTRNL

SEQ ID NO: 60-136 - skipped (77 entries)

SEQ ID NO: 137 - DNA, 2211 bp, synthetic construct
  source 1..2211: mol_type = other DNA
atggctgccgatggttatcttccagattggctcgaggacaaccttagtgaaggaattcgcgagtggtgggctttgaaacctggagcccctcaacccaaggcaaatcaacaacatcaagacaacgctcgaggtcttgtgcttccgggttacaaataccttggacccggcaacggactcgacaagggggagccggtcaacgcagcagacgcggcggccctcgagcacgacaaggcctacgaccagcagctcaaggccggagacaacccgtacctcaagtacaaccacgccgacgccgagttccaggagcggctcaaagaagatacgtcttttgggggcaacctcgggcgagcagtcttccaggccaaaaagaggcttcttgaacctcttggtctggttgaggaagcggctaagacggctcctggaaagaagaggcctgtagagcagtctcctcaggaaccggactcctccgcgggtattggcaaatcgggtgcacagcccgctaaaaagagactcaatttcggtcagactggcgacacagagtcagtcccagaccctcaaccaatcggagaacctcccgcagccccctcaggtgtgggatctcttacaatggcttcaggtggtggcgcaccagtggcagacaataacgaaggtgccgatggagtgggtagttcctcgggaaattggcattgcgattcccaatggctgggggacagagtcatcaccaccagcacccgaacctgggccctgcccacctacaacaatcacctctacaagcaaatctccaacagcacatctggaggatcttcaaatgacaacgcctacttcggctacagcaccccctgggggtattttgacttcaacagattccactgccacttctcaccacgtgactggcagcgactcatcaacaacaactggggattccggcctaagcgactcaacttcaagctcttcaacattcaggtcaaagaggttacggacaacaatggagtcaagaccatcgccaataaccttaccagcacggtccaggtcttcacggactcagactatcagctcccgtacgtgctcgggtcggctcacgagggctgcctcccgccgttcccagcggacgttttcatgattcctcagtacgggtatctgacgcttaatgatggaagccaggccgtgggtcgttcgtccttttactgcctggaatatttcccgtcgcaaatgctaagaacgggtaacaacttccagttcagctacgagtttgagaacgtacctttccatagcagctacgctcacagccaaagcctggaccgactaatgaatccactcatcgaccaatacttgtactatctctcaaagactattaacggttctggacagaatcaacaaacgctaaaattcagtgtggccggacccagcaacatggctgtccagggaagaaactacatacctggacccagctaccgacaacaacgtgtctcaaccactgtgactcaaaacaacaacagcgaatttgcttggcctggagcttcttcttgggctctcaatggacgtaatagcttgatgaatcctggacctgctatggccagccacaaagaaggagaggaccgtttctttcctttgtctggatctttaatttttggcaaacaaggaactggaagagacaacgtggatgcggacaaagtcatgataaccaacgaagaagaaattaaaactactaacccggtagcaacggagtcctatggacaagtggccacaaaccaccagagtgcccaagcacaggcgcagaccggctgggttcaaaaccaaggaatacttccgggtatggtttggcaggacagagatgtgtacctgcaaggacccatttgggccaaaattcctcacacggacggcaactttcacccttctccgctgatgggagggtttggaatgaagcacccgcctcctcagatcctcatcaaaaacacacctgtacctgcggatcctccaacggccttcaacaaggacaagctgaactctttcatcacccagtattctactggccaagtcagcgtggagatcgagtgggagctgcagaaggaaaacagcaagcgctggaacccggagatccagtacacttccaactattacaagtctaataatgttgaatttgctgttaatactgaaggtgtatatagtgaaccccgccccattggcaccagatacctgactcgtaatctgtaa

SEQ ID NO: 138 - protein, 736 aa, synthetic construct
MAADGYLPDWLEDNLSEGIREWWALKPGAPQPKANQQHQDNARGLVLPGYKYLGPGNGLDKGEPVNAADAAALEHDKAYDQQLKAGDNPYLKYNHADAEFQERLKEDTSFGGNLGRAVFQAKKRLLEPLGLVEEAAKTAPGKKRPVEQSPQEPDSSAGIGKSGAQPAKKRLNFGQTGDTESVPDPQPIGEPPAAPSGVGSLTMASGGGAPVADNNEGADGVGSSSGNWHCDSQWLGDRVITTSTRTWALPTYNNHLYKQISNSTSGGSSNDNAYFGYSTPWGYFDFNRFHCHFSPRDWQRLINNNWGFRPKRLNFKLFNIQVKEVTDNNGVKTIANNLTSTVQVFTDSDYQLPYVLGSAHEGCLPPFPADVFMIPQYGYLTLNDGSQAVGRSSFYCLEYFPSQMLRTGNNFQFSYEFENVPFHSSYAHSQSLDRLMNPLIDQYLYYLSKTINGSGQNQQTLKFSVAGPSNMAVQGRNYIPGPSYRQQRVSTTVTQNNNSEFAWPGASSWALNGRNSLMNPGPAMASHKEGEDRFFPLSGSLIFGKQGTGRDNVDADKVMITNEEEIKTTNPVATESYGQVATNHQSAQAQAQTGWVQNQGILPGMVWQDRDVYLQGPIWAKIPHTDGNFHPSPLMGGFGMKHPPPQILIKNTPVPADPPTAFNKDKLNSFITQYSTGQVSVEIEWELQKENSKRWNPEIQYTSNYYKSNNVEFAVNTEGVYSEPRPIGTRYLTRNL

SEQ ID NO: 139-199 - skipped (61 entries)

SEQ ID NO: 200 - protein, 14 aa, synthetic construct
GSGSPHSKAQNQQT

SEQ ID NO: 201 - protein, 14 aa, synthetic construct
GHDSPHKSGQNQQT

SEQ ID NO: 202 - protein, 14 aa, synthetic construct
GSGSPHARMQNQQT

SEQ ID NO: 203 - protein, 14 aa, synthetic construct
GSGSPHVKSQNQQT

SEQ ID NO: 204 - protein, 14 aa, synthetic construct
GQDSPHKSGQNQQT

SEQ ID NO: 205 - protein, 14 aa, synthetic construct
GSGSPHASRQNQQT

SEQ ID NO: 206 - protein, 14 aa, synthetic construct
GSGSPHASRQNKQT

SEQ ID NO: 207 - protein, 14 aa, synthetic construct
GSGSPHVKIQNQQT

SEQ ID NO: 208 - protein, 14 aa, synthetic construct
GSGSPHSKAKNQQT

SEQ ID NO: 209 - protein, 14 aa, synthetic construct
GSGSPHKKNQNQQT

SEQ ID NO: 210 - protein, 14 aa, synthetic construct
GSGSPHVRMQNQQT

SEQ ID NO: 211 - protein, 14 aa, synthetic construct
GSGSPHASRQKQQT

SEQ ID NO: 212 - protein, 14 aa, synthetic construct
GHSSPHRSGQNQQT

SEQ ID NO: 213 - protein, 14 aa, synthetic construct
GMRTYHLSGQNQQT

SEQ ID NO: 214 - protein, 14 aa, synthetic construct
GSGSPHTRGQNQQT

SEQ ID NO: 215 - protein, 14 aa, synthetic construct
GSGIIPVSSQNQQT

SEQ ID NO: 216 - protein, 14 aa, synthetic construct
GSEYGHKSGQNQQT

SEQ ID NO: 217 - protein, 14 aa, synthetic construct
GRGQNVSSVHRQQT

SEQ ID NO: 218 - protein, 14 aa, synthetic construct
GSSHRFYGGQNQQT

SEQ ID NO: 219 - protein, 14 aa, synthetic construct
GYFVAAWSGQNQQT

SEQ ID NO: 220 - protein, 14 aa, synthetic construct
GSVLHSHAAQNQQT

SEQ ID NO: 221 - protein, 14 aa, synthetic construct
GSGDLVVSTQNQQT

SEQ ID NO: 222 - protein, 14 aa, synthetic construct
GSYGMAASGQNQQT

SEQ ID NO: 223 - protein, 14 aa, synthetic construct
GLNHFGASGQNQQT

SEQ ID NO: 224 - protein, 14 aa, synthetic construct
GSTGSHSAGQNQHT

SEQ ID NO: 225 - protein, 14 aa, synthetic construct
GLAGHTVSGQNQQT

SEQ ID NO: 226 - protein, 14 aa, synthetic construct
GIILGASSGQNQQT

SEQ ID NO: 227 - protein, 14 aa, synthetic construct
GSGVSTYNIQNQQT

SEQ ID NO: 228 - protein, 14 aa, synthetic construct
GSLVSVQTGQNQQT

SEQ ID NO: 229 - protein, 14 aa, synthetic construct
GQSSPHRSGQNQQT

SEQ ID NO: 230 - protein, 14 aa, synthetic construct
GREYGHKSGQNQQT

SEQ ID NO: 231 - protein, 14 aa, synthetic construct
GHTLTLSSGQNQQT

SEQ ID NO: 232 - protein, 14 aa, synthetic construct
GSITLIPSGQNQQT

SEQ ID NO: 233 - protein, 14 aa, synthetic construct
GSNGFTALGQNQQT

SEQ ID NO: 234 - protein, 14 aa, synthetic construct
GSGHSSHSVQNQQT

SEQ ID NO: 235 - protein, 14 aa, synthetic construct
GSGIPQRSGKNQQT

SEQ ID NO: 236 - protein, 14 aa, synthetic construct
GSGDTLHMLQNQQT

SEQ ID NO: 237 - protein, 14 aa, synthetic construct
GERHTVLSGQNQQT

SEQ ID NO: 238 - protein, 14 aa, synthetic construct
GSGMPQSHIQNQQT

SEQ ID NO: 239 - protein, 14 aa, synthetic construct
GSGQLSGIGGNQQT

SEQ ID NO: 240 - protein, 14 aa, synthetic construct
GSGQNRKPASFAQT

SEQ ID NO: 241 - protein, 14 aa, synthetic construct
GSGSVSQLGQNQQT

SEQ ID NO: 242 - protein, 14 aa, synthetic construct
GSDFLGTHGQNQQT

SEQ ID NO: 243 - protein, 14 aa, synthetic construct
GQIVQNPSGQNQQT

SEQ ID NO: 244 - protein, 14 aa, synthetic construct
GSGTQIPSQQNQQT

SEQ ID NO: 245 - protein, 14 aa, synthetic construct
GSGQNQQSAREGLT

SEQ ID NO: 246 - protein, 14 aa, synthetic construct
GSGLGMSTGQNQQT

SEQ ID NO: 247 - protein, 14 aa, synthetic construct
GSGLPVLSGQNQQT

SEQ ID NO: 248 - protein, 14 aa, synthetic construct
GSGHSIRTDQNQQT

SEQ ID NO: 249 - protein, 14 aa, synthetic construct
GSGQSVQTVVNQQT

SEQ ID NO: 250 - protein, 14 aa, synthetic construct
GSGQNRAQSRFQQT

SEQ ID NO: 251 - protein, 14 aa, synthetic construct
GGGDLGRSSQNQQT

SEQ ID NO: 252 - protein, 14 aa, synthetic construct
GGGTKMDSGQNQQT

SEQ ID NO: 253 - protein, 14 aa, synthetic construct
GSGSPHPSRQNQQT

SEQ ID NO: 254 - protein, 14 aa, synthetic construct
GSGQFTNAGMNQQT

SEQ ID NO: 255 - protein, 14 aa, synthetic construct
GGRNGHTVGQNQQT

SEQ ID NO: 256 - protein, 14 aa, synthetic construct
GSGFGPQTGQNQQT

SEQ ID NO: 257 - protein, 14 aa, synthetic construct
GRTDSHTSGQNQQT

SEQ ID NO: 258 - protein, 14 aa, synthetic construct
GYEVLGSSGQNQQT

SEQ ID NO: 259 - protein, 14 aa, synthetic construct
GSVHLSVTGQNQQT

SEQ ID NO: 260 - protein, 14 aa, synthetic construct
GFMSYKGSGQNQQT

SEQ ID NO: 261 - protein, 14 aa, synthetic construct
GNIAGSVSGQNQQT

SEQ ID NO: 262 - protein, 14 aa, synthetic construct
GSGSHRDVSQNQQT

SEQ ID NO: 263 - protein, 14 aa, synthetic construct
GGLGSMSSGQNQQT

SEQ ID NO: 264 - protein, 14 aa, synthetic construct
GSGHLPQSAQNQQT

SEQ ID NO: 265 - protein, 14 aa, synthetic construct
GGVLVGGSGQNQQT

SEQ ID NO: 266 - protein, 14 aa, synthetic construct
GTHPYTSSGQNQQT

SEQ ID NO: 267 - protein, 14 aa, synthetic construct
GSGQNQQLKENRST

SEQ ID NO: 268 - protein, 14 aa, synthetic construct
GSGQNQQTSPHNHT

SEQ ID NO: 269 - protein, 14 aa, synthetic construct
GSGTLYPQSQNQQT

SEQ ID NO: 270 - protein, 14 aa, synthetic construct
GSGQNQQSNWITKT

SEQ ID NO: 271 - protein, 14 aa, synthetic construct
GSGYTSLFLQNQQT

SEQ ID NO: 272 - protein, 14 aa, synthetic construct
GSGVMTHVLQNQQT

SEQ ID NO: 273 - protein, 14 aa, synthetic construct
GSVSDVRAGQNQQT

SEQ ID NO: 274 - protein, 14 aa, synthetic construct
GSGQSHMATLNQQT

SEQ ID NO: 275 - protein, 14 aa, synthetic construct
GSGLSVHLAQNQQT

SEQ ID NO: 276 - protein, 14 aa, synthetic construct
GSGLSHATQQNQQT

SEQ ID NO: 277 - protein, 14 aa, synthetic construct
GSGLSVQSGQNQQT

SEQ ID NO: 278 - protein, 14 aa, synthetic construct
GSGHMTYREKNQQT

SEQ ID NO: 279 - protein, 14 aa, synthetic construct
GSKGVPTPGQNQQT

SEQ ID NO: 280 - protein, 14 aa, synthetic construct
GSGLLPLSSQNQQT

SEQ ID NO: 281 - protein, 14 aa, synthetic construct
GNGLYAVSGQNQQT

SEQ ID NO: 282 - protein, 14 aa, synthetic construct
GFNGSPSSGQNQQT

SEQ ID NO: 283 - protein, 14 aa, synthetic construct
GSGQIRHSDQNQQT

SEQ ID NO: 284 - protein, 14 aa, synthetic construct
GGQVAPSSGQNQQT

SEQ ID NO: 285 - protein, 14 aa, synthetic construct
GSFSMHTHGQNQQT

SEQ ID NO: 286 - protein, 14 aa, synthetic construct
GSGQNQQVIQGSNT

SEQ ID NO: 287 - protein, 14 aa, synthetic construct
GRVLHSHAGQNQQT

SEQ ID NO: 288 - protein, 14 aa, synthetic construct
GSGQNQQTSLQDQT

SEQ ID NO: 289 - protein, 14 aa, synthetic construct
GSGLGRAPVQNQQT

SEQ ID NO: 290 - protein, 14 aa, synthetic construct
GNGFSSASGQNQQT

SEQ ID NO: 291 - protein, 14 aa, synthetic construct
GSGQMASRESNQQT

SEQ ID NO: 292 - protein, 14 aa, synthetic construct
GPGLPNHSGQNQQT

SEQ ID NO: 293 - protein, 14 aa, synthetic construct
GNIQWQGSGQNQQT

SEQ ID NO: 294 - protein, 14 aa, synthetic construct
GMSAHMSSGQNQQT

SEQ ID NO: 295 - protein, 14 aa, synthetic construct
GHSFVNRSGQNQQT

SEQ ID NO: 296 - protein, 14 aa, synthetic construct
GRAVMDHSGQNQQT

SEQ ID NO: 297 - protein, 14 aa, synthetic construct
GALTVMQSGQNQQT

SEQ ID NO: 298 - protein, 14 aa, synthetic construct
GSGQRSPVLPNQQT

SEQ ID NO: 299 - protein, 14 aa, synthetic construct
GSGQNGHLSLKQQT

SEQ ID NO: 300 - protein, 14 aa, synthetic construct
GSLPRGTSDQNQQT

SEQ ID NO: 301 - protein, 14 aa, synthetic construct
GVAGSLVSGQNQQT

SEQ ID NO: 302 - protein, 14 aa, synthetic construct
GRGGIPQSGQNQQT

SEQ ID NO: 303 - protein, 14 aa, synthetic construct
GSGQYASSIPNQQT

SEQ ID NO: 304 - protein, 14 aa, synthetic construct
GTDFGRQSSQNQQT

SEQ ID NO: 305 - protein, 14 aa, synthetic construct
GIFMQTPSGQNQQT

SEQ ID NO: 306 - protein, 14 aa, synthetic construct
GSGQNQQTRLVDLT

SEQ ID NO: 307 - protein, 14 aa, synthetic construct
GTREMPLSGQNQQT

SEQ ID NO: 308 - protein, 14 aa, synthetic construct
GSRLVHVHGQNQQT

SEQ ID NO: 309 - protein, 14 aa, synthetic construct
GSGRLVPNGPNQQT

SEQ ID NO: 310 - protein, 14 aa, synthetic construct
GSGYLRESPQNQQT

SEQ ID NO: 311 - protein, 14 aa, synthetic construct
GARIQNASGQKQQT

SEQ ID NO: 312 - protein, 14 aa, synthetic construct
GLSNPMPSGQNQQT

SEQ ID NO: 313 - protein, 14 aa, synthetic construct
GSTVQDTRGQNQQT

SEQ ID NO: 314 - protein, 14 aa, synthetic construct
GPFGMPSSGQNQQT

SEQ ID NO: 315 - protein, 14 aa, synthetic construct
GSGQNHGVLSNQQT

SEQ ID NO: 316 - protein, 14 aa, synthetic construct
GSGYSMSQAQNQQT

SEQ ID NO: 317 - protein, 14 aa, synthetic construct
GSGMLTHTLQNQQT

SEQ ID NO: 318 - protein, 14 aa, synthetic construct
GRGSPHASRQNQQT

SEQ ID NO: 319 - protein, 14 aa, synthetic construct
GLSWPSTSGQNQQT

SEQ ID NO: 320 - protein, 14 aa, synthetic construct
GNSMERTSGQNQQT

SEQ ID NO: 321 - protein, 14 aa, synthetic construct
GSGMSPSTLQNQQT

SEQ ID NO: 322 - protein, 14 aa, synthetic construct
GSGHGQVLSQNQQT

SEQ ID NO: 323 - protein, 14 aa, synthetic construct
GRGQIYSTGGNQQT

SEQ ID NO: 324 - protein, 14 aa, synthetic construct
GVVAAHNSGQNQQT

SEQ ID NO: 325 - protein, 14 aa, synthetic construct
GDSSLRHSGQNQQT

SEQ ID NO: 326 - protein, 14 aa, synthetic construct
GSLVSQGAGQNQQT

SEQ ID NO: 327 - protein, 14 aa, synthetic construct
GSLLQAHSGQNQQT

SEQ ID NO: 328 - protein, 14 aa, synthetic construct
GSGHIYVGIQNQQT

SEQ ID NO: 329 - protein, 14 aa, synthetic construct
GHHTTVQSGQNQQT

SEQ ID NO: 330 - protein, 14 aa, synthetic construct
GSRQSKRNELNQQT

SEQ ID NO: 331 - protein, 14 aa, synthetic construct
GSGQNQQHVSSPRT

SEQ ID NO: 332 - protein, 14 aa, synthetic construct
GSSKELLWGQNQQT

SEQ ID NO: 333 - protein, 14 aa, synthetic construct
GSLSTPSSGQNQQT

SEQ ID NO: 334 - protein, 14 aa, synthetic construct
GSIGYAGQGQNQQT

SEQ ID NO: 335 - protein, 14 aa, synthetic construct
GSGQNQRVSNSQQT

SEQ ID NO: 336 - protein, 14 aa, synthetic construct
GSGYASHVQQNQQT

SEQ ID NO: 337 - protein, 14 aa, synthetic construct
GSGEYSRSGQNQQT

SEQ ID NO: 338 - protein, 14 aa, synthetic construct
GSVSTHSSGQNQQT

SEQ ID NO: 339 - protein, 14 aa, synthetic construct
GSGQNQHSLGNYQT

SEQ ID NO: 340 - protein, 14 aa, synthetic construct
GSGGLDTRGQNQQT

SEQ ID NO: 341 - protein, 14 aa, synthetic construct
GNILHATSGQNQQT

SEQ ID NO: 342 - protein, 14 aa, synthetic construct
GSGQSYTMTQNQQT

SEQ ID NO: 343 - protein, 14 aa, synthetic construct
GSGQNQHSAPNSQT

SEQ ID NO: 344 - protein, 14 aa, synthetic construct
GSGQNQQTMDHNRT

SEQ ID NO: 345 - protein, 14 aa, synthetic construct
GSNGGVGTGQNQQT

SEQ ID NO: 346 - protein, 14 aa, synthetic construct
GAGSIIPSGQNQQT

SEQ ID NO: 347 - protein, 14 aa, synthetic construct
GSGQTHGGQHNQQT

SEQ ID NO: 348 - protein, 14 aa, synthetic construct
GSNLSFQSGQNQQT

SEQ ID NO: 349 - protein, 14 aa, synthetic construct
GATLQVHSGQNQQT

SEQ ID NO: 350 - protein, 14 aa, synthetic construct
GSGFNQRSEQNQQT

SEQ ID NO: 351 - protein, 14 aa, synthetic construct
GSGSLRDFDQNQQT

SEQ ID NO: 352 - protein, 14 aa, synthetic construct
GSGDSITGKQNQQT

SEQ ID NO: 353 - protein, 14 aa, synthetic construct
GSGQDRNIVQNQQT

SEQ ID NO: 354 - protein, 14 aa, synthetic construct
GSGLSHSHQQNQQT

SEQ ID NO: 355 - protein, 14 aa, synthetic construct
GSGQNQQTGMSSVK

SEQ ID NO: 356 - protein, 14 aa, synthetic construct
GSVTHGISGQNQQT

SEQ ID NO: 357 - protein, 14 aa, synthetic construct
GVVAHQPSGQNQQT

SEQ ID NO: 358 - protein, 14 aa, synthetic construct
GSGPILGQLQNQQT

SEQ ID NO: 359 - protein, 14 aa, synthetic construct
GSGHVPNSGLNQQT

SEQ ID NO: 360 - protein, 14 aa, synthetic construct
GDAGVRSSGQNQQT

SEQ ID NO: 361 - protein, 14 aa, synthetic construct
GSGSQLMSLQNQQT

SEQ ID NO: 362 - protein, 14 aa, synthetic construct
GSGLDYSQRQNQQT

SEQ ID NO: 363 - protein, 14 aa, synthetic construct
GSGQSSGRLINKQT

SEQ ID NO: 364 - protein, 14 aa, synthetic construct
GSSVSPSSGQNQQT

SEQ ID NO: 365 - protein, 14 aa, synthetic construct
GSGQVVGLSGNQQT

SEQ ID NO: 366 - protein, 14 aa, synthetic construct
GSNMGVPLGQNQQT

SEQ ID NO: 367 - protein, 14 aa, synthetic construct
GSFYPSSTGQNQQT

SEQ ID NO: 368 - protein, 14 aa, synthetic construct
GSGQNQQTRLTDLT

SEQ ID NO: 369 - protein, 14 aa, synthetic construct
GPTNGRSSGQNQQT

SEQ ID NO: 370 - protein, 14 aa, synthetic construct
GSGLLHGKLQNQQT

SEQ ID NO: 371 - protein, 14 aa, synthetic construct
GANMGHVSGQNQQT

SEQ ID NO: 372 - protein, 14 aa, synthetic construct
GSGQNQQSGRGDLT

SEQ ID NO: 373 - protein, 14 aa, synthetic construct
GSHGHYASGQKQQT

SEQ ID NO: 374 - protein, 14 aa, synthetic construct
GSGDLRISPQNQQT

SEQ ID NO: 375 - protein, 14 aa, synthetic construct
GSGMPVILGQNQQT

SEQ ID NO: 376 - protein, 14 aa, synthetic construct
GRGVITSSGQNHQT

SEQ ID NO: 377 - protein, 14 aa, synthetic construct
GSGHSVSGPQNQQT

SEQ ID NO: 378 - protein, 14 aa, synthetic construct
GSRNGHTVGRNQQT

SEQ ID NO: 379 - protein, 14 aa, synthetic construct
GAGVHMVSGQNQQT

SEQ ID NO: 380 - protein, 14 aa, synthetic construct
GSGQNHRPSVLQQT

SEQ ID NO: 381 - protein, 14 aa, synthetic construct
GSGSPRDSIQNQQT

SEQ ID NO: 382 - protein, 14 aa, synthetic construct
GSGQGIHSSVNQQT

SEQ ID NO: 383 - protein, 14 aa, synthetic construct
GSGQQLSITPNQQT

SEQ ID NO: 384 - protein, 14 aa, synthetic construct
GGYHSQTSGQNQQT

SEQ ID NO: 385 - protein, 14 aa, synthetic construct
GSLHHDNHGQNQQT

SEQ ID NO: 386 - protein, 14 aa, synthetic construct
GIMARDSSGQNQQT

SEQ ID NO: 387 - protein, 14 aa, synthetic construct
GVVHITNSGQNQQT

SEQ ID NO: 388 - protein, 14 aa, synthetic construct
GSGQNQHSAPFNQT

SEQ ID NO: 389 - protein, 14 aa, synthetic construct
GSGQTSGLKQNQQT

SEQ ID NO: 390 - protein, 14 aa, synthetic construct
GSGQNQQTSLSNTA

SEQ ID NO: 391 - protein, 14 aa, synthetic construct
GSGQNQAVHNKSQT

SEQ ID NO: 392 - protein, 14 aa, synthetic construct
GVHTHLPSGQNQQT

SEQ ID NO: 393 - protein, 14 aa, synthetic construct
GHLTMHNSGQNHQT

SEQ ID NO: 394 - protein, 14 aa, synthetic construct
GSGSSSRPYQNQQT

SEQ ID NO: 395 - protein, 14 aa, synthetic construct
GILLATPSGQNQQT

SEQ ID NO: 396 - protein, 14 aa, synthetic construct
GSGQNAGSFPNQQT

SEQ ID NO: 397 - protein, 14 aa, synthetic construct
GSRDGHTVGQNQQT

SEQ ID NO: 398 - protein, 14 aa, synthetic construct
GSLLISTSGQNQQT

SEQ ID NO: 399 - protein, 14 aa, synthetic construct
GSGAMPSHGQNQQT

SEQ ID NO: 400 - protein, 14 aa, synthetic construct
GALVSPISGQNQQT

SEQ ID NO: 401 - protein, 14 aa, synthetic construct
GSLSSHGVGQNQQT

SEQ ID NO: 402 - protein, 14 aa, synthetic construct
GSGQNQQASLAMRT

SEQ ID NO: 403 - protein, 14 aa, synthetic construct
GPGLGSHSGQNQQT

SEQ ID NO: 404 - protein, 14 aa, synthetic construct
GHDSQHKSGQNQQT

SEQ ID NO: 405 - protein, 14 aa, synthetic construct
GSGLTLSATQNQQT

SEQ ID NO: 406 - protein, 14 aa, synthetic construct
GSGQVVAHVGNQQT

SEQ ID NO: 407 - protein, 14 aa, synthetic construct
GSGLRTMTTQNQQT

SEQ ID NO: 408 - protein, 14 aa, synthetic construct
GSGQVGRLLQNQQT

SEQ ID NO: 409 - protein, 14 aa, synthetic construct
GSGQLSHQSVNQQT

SEQ ID NO: 410 - protein, 14 aa, synthetic construct
GSGDRYQTLQNQQT

SEQ ID NO: 411 - protein, 14 aa, synthetic construct
GSGQNQQLKSSAQT

SEQ ID NO: 412 - protein, 14 aa, synthetic construct
GSGQNQYSIPVAQT

SEQ ID NO: 413 - protein, 14 aa, synthetic construct
GSGERLHLTQNQQT

SEQ ID NO: 414 - protein, 14 aa, synthetic construct
GSGHNQQVRTAPNT

SEQ ID NO: 415 - protein, 14 aa, synthetic construct
GGLSHVMSGQNQQT

SEQ ID NO: 416 - protein, 14 aa, synthetic construct
GSGQSHRDVLNQQT

SEQ ID NO: 417 - protein, 14 aa, synthetic construct
GSGQNLAGRMDQQT

SEQ ID NO: 418 - protein, 14 aa, synthetic construct
GSGQNQQTNRGNPM

SEQ ID NO: 419 - protein, 14 aa, synthetic construct
GSGQSYQRDHNQQT

SEQ ID NO: 420 - protein, 14 aa, synthetic construct
GSLLSAGMGQNQHT

SEQ ID NO: 421 - protein, 14 aa, synthetic construct
GSGQNQQTAIYRNI

SEQ ID NO: 422 - protein, 14 aa, synthetic construct
GSGQNQQTSGTTNC

SEQ ID NO: 423 - protein, 14 aa, synthetic construct
GMTSHSVSGQNQQT

SEQ ID NO: 424 - protein, 14 aa, synthetic construct
GSSQSTGYQPNQQT

SEQ ID NO: 425 - protein, 14 aa, synthetic construct
GSLKPTTLGQNQQT

SEQ ID NO: 426 - protein, 14 aa, synthetic construct
GRMFSLGSGQNQQT

SEQ ID NO: 427 - protein, 14 aa, synthetic construct
GSGQNQQTALGVKC

SEQ ID NO: 428 - protein, 14 aa, synthetic construct
GAMVSHSSGQNQQT

SEQ ID NO: 429 - protein, 14 aa, synthetic construct
GSGQNQQRNSDSVT

SEQ ID NO: 430 - protein, 14 aa, synthetic construct
GSGQSMTLHLNQQT

SEQ ID NO: 431 - protein, 14 aa, synthetic construct
GSGQVHQAEVNQQT

SEQ ID NO: 432 - protein, 14 aa, synthetic construct
GSGQNQSQNHLQQT

SEQ ID NO: 433 - protein, 14 aa, synthetic construct
GSLLTTASGQNQQT

SEQ ID NO: 434 - protein, 14 aa, synthetic construct
GSGLIRTAAQNQQT

SEQ ID NO: 435 - protein, 14 aa, synthetic construct
GSGQNQQTVSRQST

SEQ ID NO: 436 - protein, 14 aa, synthetic construct
GSGQYANHGINQQT

SEQ ID NO: 437 - protein, 14 aa, synthetic construct
GSRSTGPSGQNQQT

SEQ ID NO: 438 - protein, 14 aa, synthetic construct
GRGVQQKLQQNQQT

SEQ ID NO: 439 - protein, 14 aa, synthetic construct
GSGQNQQVHLSTGT

SEQ ID NO: 440 - protein, 14 aa, synthetic construct
GSGQNQQLSAKSST

SEQ ID NO: 441 - protein, 14 aa, synthetic construct
GSGYKAARPQNQQT

SEQ ID NO: 442 - protein, 14 aa, synthetic construct
GSAGISPSGQNQQT

SEQ ID NO: 443 - protein, 14 aa, synthetic construct
GSGQNRAHAFLQQT

SEQ ID NO: 444 - protein, 14 aa, synthetic construct
GSGLSGITMQNQQT

SEQ ID NO: 445 - protein, 14 aa, synthetic construct
GPGSAHSSGQNQQT

SEQ ID NO: 446 - protein, 14 aa, synthetic construct
GSSHTQALGQNQQT

SEQ ID NO: 447 - protein, 14 aa, synthetic construct
GSGVHGVSSQNQQT

SEQ ID NO: 448 - protein, 14 aa, synthetic construct
GSSGRDMGGQNQQT

SEQ ID NO: 449 - protein, 14 aa, synthetic construct
GERAFPTSGQNQQT

SEQ ID NO: 450 - protein, 14 aa, synthetic construct
GGRIVSLSGQNQQT

SEQ ID NO: 451 - protein, 14 aa, synthetic construct
GSGQNSYSHTSQQT

SEQ ID NO: 452 - protein, 14 aa, synthetic construct
GLGYPGSSGQNQQT

SEQ ID NO: 453 - protein, 14 aa, synthetic construct
GSGPQSHTGQNQQT

SEQ ID NO: 454 - protein, 14 aa, synthetic construct
GSGQNQQLSRDAST

SEQ ID NO: 455 - protein, 14 aa, synthetic construct
GSGQILHSVPNQQT

SEQ ID NO: 456 - protein, 14 aa, synthetic construct
GSGFHTDSRQNQQT

SEQ ID NO: 457 - protein, 14 aa, synthetic construct
GSGQSHSLATNQQT

SEQ ID NO: 458 - protein, 14 aa, synthetic construct
GSGQNQQTLSKPWT

SEQ ID NO: 459 - protein, 14 aa, synthetic construct
GSGHAAISQQNQQT

SEQ ID NO: 460 - protein, 14 aa, synthetic construct
GSGQNQQQIGGNST

SEQ ID NO: 461 - protein, 14 aa, synthetic construct
GGGPMAGSGQNQQT

SEQ ID NO: 462 - protein, 14 aa, synthetic construct
GMRMEYQSGQNQQT

SEQ ID NO: 463 - protein, 14 aa, synthetic construct
GSGQNQQGTLLHQT

SEQ ID NO: 464 - protein, 14 aa, synthetic construct
GSGQNQRSSGGVQT

SEQ ID NO: 465 - protein, 14 aa, synthetic construct
GSGQNQRGALATQT

SEQ ID NO: 466 - protein, 14 aa, synthetic construct
GSGTVHAATQNQQT

SEQ ID NO: 467 - protein, 14 aa, synthetic construct
GSRMTQQFGQNQQT

SEQ ID NO: 468 - protein, 14 aa, synthetic construct
GSSSPGASGQNQQT

SEQ ID NO: 469 - protein, 14 aa, synthetic construct
GHPSPHVSGQNQQT

SEQ ID NO: 470 - protein, 14 aa, synthetic construct
GSGSHHASRQNQQT

SEQ ID NO: 471 - protein, 14 aa, synthetic construct
GAVGHSYSGQNQQT

SEQ ID NO: 472 - protein, 14 aa, synthetic construct
GSRSQYDIGQNQQT

SEQ ID NO: 473 - protein, 14 aa, synthetic construct
GSGQGPQERGNQQT

SEQ ID NO: 474 - protein, 14 aa, synthetic construct
GSIAHVGTGQNQQT

SEQ ID NO: 475 - protein, 14 aa, synthetic construct
GSGQNQQKQNHGNT

SEQ ID NO: 476 - protein, 14 aa, synthetic construct
GSGQNQQALGSQRT

SEQ ID NO: 477 - protein, 14 aa, synthetic construct
GSGAITHMPQNQQT

SEQ ID NO: 478 - protein, 14 aa, synthetic construct
GSGQRNPLLLNQQT

SEQ ID NO: 479 - protein, 14 aa, synthetic construct
GSSGIPVSHQNQQT

SEQ ID NO: 480 - protein, 14 aa, synthetic construct
GVHSLTPSGQNQQT

SEQ ID NO: 481 - protein, 14 aa, synthetic construct
GVIVLHGSGQNQQT

SEQ ID NO: 482 - protein, 14 aa, synthetic construct
GGTRVVDSGQNQQT

SEQ ID NO: 483 - protein, 14 aa, synthetic construct
GSGGVTYQSQNQQT

SEQ ID NO: 484 - protein, 14 aa, synthetic construct
GSGQNQAGHGPGQT

SEQ ID NO: 485 - protein, 14 aa, synthetic construct
GSGQLVTSGPNQQT

SEQ ID NO: 486 - protein, 14 aa, synthetic construct
GSGIAAQRTQNQQT

SEQ ID NO: 487 - protein, 14 aa, synthetic construct
GSTPAGVGGQNQQT

SEQ ID NO: 488 - protein, 14 aa, synthetic construct
GSGQNQQTSTGVHS

SEQ ID NO: 489 - protein, 14 aa, synthetic construct
GSGQIRQLVDNQQT

SEQ ID NO: 490 - protein, 14 aa, synthetic construct
GSLIGMQSGQNQQT

SEQ ID NO: 491 - protein, 14 aa, synthetic construct
GSGQIKGKMDNQQT

SEQ ID NO: 492 - protein, 14 aa, synthetic construct
GSGSDMSSWQNQQT

SEQ ID NO: 493 - protein, 14 aa, synthetic construct
GRGQNQQHTGLATT

SEQ ID NO: 494 - protein, 14 aa, synthetic construct
GSGQNQQTLYSSNT

SEQ ID NO: 495 - protein, 14 aa, synthetic construct
GSGQTQVLKSNQQT

SEQ ID NO: 496 - protein, 14 aa, synthetic construct
GSRTLSNVGQNQQT

SEQ ID NO: 497 - protein, 14 aa, synthetic construct
GSGVQHSLPQNQQT

SEQ ID NO: 498 - protein, 14 aa, synthetic construct
GNYLHQASGQNQQT

SEQ ID NO: 499 - protein, 14 aa, synthetic construct
GSGGTSVHQQNQQT

SEQ ID NO: 500 - protein, 14 aa, synthetic construct
GMDHSRPSGQNQQT

SEQ ID NO: 501 - protein, 14 aa, synthetic construct
GSGQNQQSMGTFTT

SEQ ID NO: 502 - protein, 14 aa, synthetic construct
GSGQNQQTPLRPPT

SEQ ID NO: 503 - protein, 14 aa, synthetic construct
GSGQNQHHSVSQQT

SEQ ID NO: 504 - protein, 14 aa, synthetic construct
GSGQLRSLSTNQQT

SEQ ID NO: 505 - protein, 14 aa, synthetic construct
GSGSPRQLSQNQQT

SEQ ID NO: 506 - protein, 14 aa, synthetic construct
GSGQNQQTTASSHT

SEQ ID NO: 507 - protein, 14 aa, synthetic construct
GRGQVVSTHQNQQT

SEQ ID NO: 508 - protein, 14 aa, synthetic construct
GSAQVSMVGQNQQT

SEQ ID NO: 509 - protein, 14 aa, synthetic construct
GSSTLVTIGKNQQT

SEQ ID NO: 510 - protein, 14 aa, synthetic construct
GFAHQASSGQNQQT

SEQ ID NO: 511 - protein, 14 aa, synthetic construct
GSGQPVLSISNQQT

SEQ ID NO: 512 - protein, 14 aa, synthetic construct
GSGQSHRSELNQQT

SEQ ID NO: 513 - protein, 14 aa, synthetic construct
GSSVGSPIGQNQQT

SEQ ID NO: 514 - protein, 14 aa, synthetic construct
GSGMPIRNVQNQQT

SEQ ID NO: 515 - protein, 14 aa, synthetic construct
GSSTRVDSGQNQQT

SEQ ID NO: 516 - protein, 14 aa, synthetic construct
GSGQNQQTAMRSTT

SEQ ID NO: 517 - protein, 14 aa, synthetic construct
GSGQNQQHSSSHLT

SEQ ID NO: 518 - protein, 14 aa, synthetic construct
GSRNGHAVGQNQQT

SEQ ID NO: 519 - protein, 14 aa, synthetic construct
GLGAYQSSGQNQQT

SEQ ID NO: 520 - protein, 14 aa, synthetic construct
GPGLSGHSGQNQQT

SEQ ID NO: 521 - protein, 14 aa, synthetic construct
GSTGIVSSGQNQQT

SEQ ID NO: 522 - protein, 14 aa, synthetic construct
GSRTTQVIGQNQQT

SEQ ID NO: 523 - protein, 14 aa, synthetic construct
GSGLLHRAQQNQQT

SEQ ID NO: 524 - protein, 14 aa, synthetic construct
GSGQNAQQAAAQQT

SEQ ID NO: 525 - protein, 14 aa, synthetic construct
GSGQNQQSALRTQT

SEQ ID NO: 526 - protein, 14 aa, synthetic construct
GSGFLSDTRQNQQT

SEQ ID NO: 527 - protein, 14 aa, synthetic construct
GSGLLYHDQQNQQT

SEQ ID NO: 528 - protein, 14 aa, synthetic construct
GSGQNQHYSLHKQT

SEQ ID NO: 529 - protein, 14 aa, synthetic construct
GSGHSPLPQQNQQT

SEQ ID NO: 530 - protein, 14 aa, synthetic construct
GNGHSMRPNQNQQT

SEQ ID NO: 531 - protein, 14 aa, synthetic construct
GSGLKWSTLQNQQT

SEQ ID NO: 532 - protein, 14 aa, synthetic construct
GSGQMGRQAVNQQT

SEQ ID NO: 533 - protein, 14 aa, synthetic construct
GSGQNQQTSGVLTL

SEQ ID NO: 534 - protein, 14 aa, synthetic construct
GSGQNQQALHNPHT

SEQ ID NO: 535 - protein, 14 aa, synthetic construct
GSGQNQQVIPNSKT

SEQ ID NO: 536 - protein, 14 aa, synthetic construct
GSPLQDRVGQNQQT

SEQ ID NO: 537 - protein, 14 aa, synthetic construct
GSGQNQYSSTNPQT

SEQ ID NO: 538 - protein, 14 aa, synthetic construct
GAMTVTISGQNQQT

SEQ ID NO: 539 - protein, 14 aa, synthetic construct
GSGQNQQLQTLIRT

SEQ ID NO: 540 - protein, 14 aa, synthetic construct
GSGLRQTSQQNQQT

SEQ ID NO: 541 - protein, 14 aa, synthetic construct
GSGQNQQTGLRQQT

SEQ ID NO: 542 - protein, 14 aa, synthetic construct
GSGQTRQMKDNQQT

SEQ ID NO: 543 - protein, 14 aa, synthetic construct
GSGQNHGLQSGQQT

SEQ ID NO: 544 - protein, 14 aa, synthetic construct
GSGQSHRQPENQQT

SEQ ID NO: 545 - protein, 14 aa, synthetic construct
GSGQDRHIVQNQQT

SEQ ID NO: 546 - protein, 14 aa, synthetic construct
GSGQNQQLPHSNLT

SEQ ID NO: 547 - protein, 14 aa, synthetic construct
GSGQLSVPYDNQQT

SEQ ID NO: 548 - protein, 14 aa, synthetic construct
GSGRNPQTQPLQQT

SEQ ID NO: 549 - protein, 14 aa, synthetic construct
GSGQPYSTGLNQQT

SEQ ID NO: 550 - protein, 14 aa, synthetic construct
GSGQNQQTHGGLRD

SEQ ID NO: 551 - protein, 14 aa, synthetic construct
GAYGMVSSGQNQQT

SEQ ID NO: 552 - protein, 14 aa, synthetic construct
GSGIQSSYSQNQQT

SEQ ID NO: 553 - protein, 14 aa, synthetic construct
GPRLSDQSGQNQQT

SEQ ID NO: 554 - protein, 14 aa, synthetic construct
GSGQNQQTHPSPCT

SEQ ID NO: 555 - protein, 14 aa, synthetic construct
GSGQSFQMHTNQQT

SEQ ID NO: 556 - protein, 14 aa, synthetic construct
GSGQNQQTGNPKHT

SEQ ID NO: 557 - protein, 14 aa, synthetic construct
GFSSAVHSGQNQQT

SEQ ID NO: 558 - protein, 14 aa, synthetic construct
GSGQNQQTSMSNAT

SEQ ID NO: 559 - protein, 14 aa, synthetic construct
GSGQDMKQHHNQQT

SEQ ID NO: 560 - protein, 14 aa, synthetic construct
GLRLSTPSGQNQQT

SEQ ID NO: 561 - protein, 14 aa, synthetic construct
GSGQNQQTSVYMNT

SEQ ID NO: 562 - protein, 14 aa, synthetic construct
GSGQNQYSQSSMQT

SEQ ID NO: 563 - protein, 14 aa, synthetic construct
GSGQNQQSMADHTT

SEQ ID NO: 564 - protein, 14 aa, synthetic construct
GWERSFVSGQNQQT

SEQ ID NO: 565 - protein, 14 aa, synthetic construct
GLLAGKSSGQNQQT

SEQ ID NO: 566 - protein, 14 aa, synthetic construct
GKSFVPQSGQNQQT

SEQ ID NO: 567 - protein, 14 aa, synthetic construct
GSGQMQSAGSNQQT

SEQ ID NO: 568 - protein, 14 aa, synthetic construct
GSDQNQRLTSSMQT

SEQ ID NO: 569 - protein, 14 aa, synthetic construct
GESRAVLSGQNQQT

SEQ ID NO: 570 - protein, 14 aa, synthetic construct
GSVFGVPSGQNQQT

SEQ ID NO: 571 - protein, 14 aa, synthetic construct
GSGLPDRNLQNQQT

SEQ ID NO: 572 - protein, 14 aa, synthetic construct
GSGTHNSAIQNQQT

SEQ ID NO: 573 - protein, 14 aa, synthetic construct
GSGMIIASMQNQQT

SEQ ID NO: 574 - protein, 14 aa, synthetic construct
GGITWTDSGQNQQT

SEQ ID NO: 575 - protein, 14 aa, synthetic construct
GSGQNQQASGRQQT

SEQ ID NO: 576 - protein, 14 aa, synthetic construct
GSGQNQQPHLKSLT

SEQ ID NO: 577 - protein, 14 aa, synthetic construct
GPPQHMTSGQNQQT

SEQ ID NO: 578 - protein, 14 aa, synthetic construct
GSGQNQQASLPSRT

SEQ ID NO: 579 - protein, 14 aa, synthetic construct
GSGQIVSTQTNQQT

SEQ ID NO: 580 - protein, 14 aa, synthetic construct
GSGKGHSAGQNQQT

SEQ ID NO: 581 - protein, 14 aa, synthetic construct
GSGQNTRLQLGQQT

SEQ ID NO: 582 - protein, 14 aa, synthetic construct
GSVGSRPVGQNQQT

SEQ ID NO: 583 - protein, 14 aa, synthetic construct
GSSHTLALGQNQQT

SEQ ID NO: 584 - protein, 14 aa, synthetic construct
GMYEYSQSGQNQQT

SEQ ID NO: 585 - protein, 14 aa, synthetic construct
GNGQNQQHSILHGT

SEQ ID NO: 586 - protein, 14 aa, synthetic construct
GSGYNQPHLQNQQT

SEQ ID NO: 587 - protein, 14 aa, synthetic construct
GPLVNASSGQNQQT

SEQ ID NO: 588 - protein, 14 aa, synthetic construct
GSGQNQQVLTTART

SEQ ID NO: 589 - protein, 14 aa, synthetic construct
GSGQNQHSVHNDQT

SEQ ID NO: 590 - protein, 14 aa, synthetic construct
GAGLIMHSGQNQQT

SEQ ID NO: 591 - protein, 14 aa, synthetic construct
GMGRHSASGQNQQT

SEQ ID NO: 592 - protein, 14 aa, synthetic construct
GSHSQSGHGQNQQT

SEQ ID NO: 593 - protein, 14 aa, synthetic construct
GSSTTIVSGQNHQT

SEQ ID NO: 594 - protein, 14 aa, synthetic construct
GRHLVTASGQNQQT

SEQ ID NO: 595 - protein, 14 aa, synthetic construct
GSGQNQQHANLNQT

SEQ ID NO: 596 - protein, 14 aa, synthetic construct
GSGSTHSKAQNQQT

SEQ ID NO: 597 - protein, 14 aa, synthetic construct
GSGQNKQMLSGNTT

SEQ ID NO: 598 - protein, 14 aa, synthetic construct
GSGQVHNPTQNQQT

SEQ ID NO: 599 - protein, 14 aa, synthetic construct
GSGQNQQIPHVHQT

SEQ ID NO: 600 - protein, 14 aa, synthetic construct
GSLHAGLSGQNQQT

SEQ ID NO: 601 - protein, 14 aa, synthetic construct
GPAQHGTSGQNQQT

SEQ ID NO: 602 - protein, 14 aa, synthetic construct
GEKAVTSSGQNQQT

SEQ ID NO: 603 - protein, 14 aa, synthetic construct
GSGQNQQTMANGQR

SEQ ID NO: 604 - protein, 14 aa, synthetic construct
GSGSPHSKDQNQQT

SEQ ID NO: 605 - protein, 14 aa, synthetic construct
GSFSMGYGGQNQQT

SEQ ID NO: 606 - protein, 14 aa, synthetic construct
GSGTHLVSLQNQQT

SEQ ID NO: 607 - protein, 14 aa, synthetic construct
GSGQMQPHVQNQQT

SEQ ID NO: 608 - protein, 14 aa, synthetic construct
GSGQNQQVAGLNNT

SEQ ID NO: 609 - protein, 14 aa, synthetic construct
GSSQNQQHDMRLRT

SEQ ID NO: 610 - protein, 14 aa, synthetic construct
GPASLPISGQNQQT

SEQ ID NO: 611 - protein, 14 aa, synthetic construct
GSGQNQQPPLATRT

SEQ ID NO: 612 - protein, 14 aa, synthetic construct
GSSRVPVSGQNQQT

SEQ ID NO: 613 - protein, 14 aa, synthetic construct
GSGQNQQTNLGHTT

SEQ ID NO: 614 - protein, 14 aa, synthetic construct
GSGQNQQLVSRVQT

SEQ ID NO: 615 - protein, 14 aa, synthetic construct
GPNSYPVSGQKQQT

SEQ ID NO: 616 - protein, 14 aa, synthetic construct
GHAHYQASGQNQQT

SEQ ID NO: 617 - protein, 14 aa, synthetic construct
GSGQALLSTGNQQT

SEQ ID NO: 618 - protein, 14 aa, synthetic construct
GSGQLPRQMTNQQT

SEQ ID NO: 619 - protein, 14 aa, synthetic construct
GSGFPKSTEQNQQT

SEQ ID NO: 620 - protein, 14 aa, synthetic construct
GSRETSLSGQNQQT

SEQ ID NO: 621 - protein, 14 aa, synthetic construct
GSGQNQQGTGVSHT

SEQ ID NO: 622 - protein, 14 aa, synthetic construct
GSRTVPVYGQNQQT

SEQ ID NO: 623 - protein, 14 aa, synthetic construct
GSNAQSAHGQNQQT

SEQ ID NO: 624 - protein, 14 aa, synthetic construct
GAFHLAASGQNQQT

SEQ ID NO: 625 - protein, 14 aa, synthetic construct
GSGQYRSSSDNQQT

SEQ ID NO: 626 - protein, 14 aa, synthetic construct
GSGQVYISTPNQQT

SEQ ID NO: 627 - protein, 14 aa, synthetic construct
GSGVSTQLLQNQQT

SEQ ID NO: 628 - protein, 14 aa, synthetic construct
GSGQLGLSVTNQQT

SEQ ID NO: 629 - protein, 14 aa, synthetic construct
GSGSNMRLSQNQQT

SEQ ID NO: 630 - protein, 14 aa, synthetic construct
GSGQNLHSGLPQQT

SEQ ID NO: 631 - protein, 14 aa, synthetic construct
GSSHTLALGQNKQT

SEQ ID NO: 632 - protein, 14 aa, synthetic construct
GSGQNQHSLPAHRT

SEQ ID NO: 633 - protein, 14 aa, synthetic construct
GSGQNQGTVYPNQT

SEQ ID NO: 634 - protein, 14 aa, synthetic construct
GSGQNQQPSLRQST

SEQ ID NO: 635 - protein, 14 aa, synthetic construct
GSGQNARLKDNQQT

SEQ ID NO: 636 - protein, 14 aa, synthetic construct
GHAGSTGSGQNQQT

SEQ ID NO: 637 - protein, 14 aa, synthetic construct
GSGQALSSSGNQQT

SEQ ID NO: 638 - protein, 14 aa, synthetic construct
GSGASESHRQNQQT

SEQ ID NO: 639 - protein, 14 aa, synthetic construct
GVGVITSSGQNQQT

SEQ ID NO: 640 - protein, 14 aa, synthetic construct
GSLYGQSLGQNQQT

SEQ ID NO: 641 - protein, 14 aa, synthetic construct
GSGQMSDVHGNQQT

SEQ ID NO: 642 - protein, 14 aa, synthetic construct
GSGQNQQHSSKATT

SEQ ID NO: 643 - protein, 14 aa, synthetic construct
GSGQNQQTSVSQQT

SEQ ID NO: 644 - protein, 14 aa, synthetic construct
GSGQKMWKLDNQQT

SEQ ID NO: 645 - protein, 14 aa, synthetic construct
GSGQNVSMQVNQQT

SEQ ID NO: 646 - protein, 14 aa, synthetic construct
GSGQNQRATLSNQT

SEQ ID NO: 647 - protein, 14 aa, synthetic construct
GSGQASSKSANQQT

SEQ ID NO: 648 - protein, 14 aa, synthetic construct
GSGKNQTPIPKGQT

SEQ ID NO: 649 - protein, 14 aa, synthetic construct
GSGQNQQTRQEGST

SEQ ID NO: 650 - protein, 14 aa, synthetic construct
GASSLATSGQNQQT

SEQ ID NO: 651 - protein, 14 aa, synthetic construct
GSGQRGSLTENQQT

SEQ ID NO: 652 - protein, 14 aa, synthetic construct
GSEQTRQRGQNQQT

SEQ ID NO: 653 - protein, 14 aa, synthetic construct
GSGQNQQTLTASKE

SEQ ID NO: 654 - protein, 14 aa, synthetic construct
GSGTSGKTGKNQQT

SEQ ID NO: 655 - protein, 14 aa, synthetic construct
GQLVTFTSGQNQQT

SEQ ID NO: 656 - protein, 14 aa, synthetic construct
GSGQNQQSANKILT

SEQ ID NO: 657 - protein, 14 aa, synthetic construct
GSGQNQQHHSSHTT

SEQ ID NO: 658 - protein, 14 aa, synthetic construct
GSGQNQKGMQPNQT

SEQ ID NO: 659 - protein, 14 aa, synthetic construct
GSGQLVSGLYNQQT

SEQ ID NO: 660 - protein, 14 aa, synthetic construct
GSSVGVPSGQNQQT

SEQ ID NO: 661 - protein, 14 aa, synthetic construct
GSGQNQQWDSRRQT

SEQ ID NO: 662 - protein, 14 aa, synthetic construct
GSEQTRQSGQNQQT

SEQ ID NO: 663 - protein, 14 aa, synthetic construct
GSGIGSHIPQNQQT

SEQ ID NO: 664 - protein, 14 aa, synthetic construct
GSGQNQRLHGVDQT

SEQ ID NO: 665 - protein, 14 aa, synthetic construct
GEVSRVLSGQNQQT

SEQ ID NO: 666 - protein, 14 aa, synthetic construct
GSGQNQQKVSPLLT

SEQ ID NO: 667 - protein, 14 aa, synthetic construct
GSGLALERSQNQQT

SEQ ID NO: 668 - protein, 14 aa, synthetic construct
GPDRIGSSGQNQQT

SEQ ID NO: 669 - protein, 14 aa, synthetic construct
GSGQNQDHQNKQQT

SEQ ID NO: 670 - protein, 14 aa, synthetic construct
GSGQNQQTALYNNT

SEQ ID NO: 671 - protein, 14 aa, synthetic construct
GSGAVHLTAQNQQT

SEQ ID NO: 672 - protein, 14 aa, synthetic construct
GSLVSTQSGQNQQT

SEQ ID NO: 673 - protein, 14 aa, synthetic construct
GSGVSARMVQNQQT

SEQ ID NO: 674 - protein, 14 aa, synthetic construct
GSGQTRMPLANQQT

SEQ ID NO: 675 - protein, 14 aa, synthetic construct
GSGISSRNMQNQQT

SEQ ID NO: 676 - protein, 14 aa, synthetic construct
GSGEKVHSGQNQQT

SEQ ID NO: 677 - protein, 14 aa, synthetic construct
GSGQNQQKLSSMST

SEQ ID NO: 678 - protein, 14 aa, synthetic construct
GSGQNQQTGQHMRV

SEQ ID NO: 679 - protein, 14 aa, synthetic construct
GSGMIHTTAQNQQT

SEQ ID NO: 680 - protein, 14 aa, synthetic construct
GSGQNWPALKGQQT

SEQ ID NO: 681 - protein, 14 aa, synthetic construct
GASHMSISGQNQQT

SEQ ID NO: 682 - protein, 14 aa, synthetic construct
GSDQNQQLGYSKQT

SEQ ID NO: 683 - protein, 14 aa, synthetic construct
GIPSIRESGQNQQT

SEQ ID NO: 684 - protein, 14 aa, synthetic construct
GSGIPSVKFQNQQT

SEQ ID NO: 685 - protein, 14 aa, synthetic construct
GSGQNQQTSVSQNV

SEQ ID NO: 686 - protein, 14 aa, synthetic construct
GSGQNQQIGESRMT

SEQ ID NO: 687 - protein, 14 aa, synthetic construct
GSGSSSMSFQNQQT

SEQ ID NO: 688 - protein, 14 aa, synthetic construct
GSGQKQERAVSKQT

SEQ ID NO: 689 - protein, 14 aa, synthetic construct
GCTTRLNSGQNQQT

SEQ ID NO: 690 - protein, 14 aa, synthetic construct
GSGQNQQIISTKIT

SEQ ID NO: 691 - protein, 14 aa, synthetic construct
GSGQNQQKSLNGNT

SEQ ID NO: 692 - protein, 14 aa, synthetic construct
GSGIPAPRLQNQQT

SEQ ID NO: 693 - protein, 14 aa, synthetic construct
GSGQIRESMGNQQT

SEQ ID NO: 694 - protein, 14 aa, synthetic construct
GSGQNSGVHFNQQT

SEQ ID NO: 695 - protein, 14 aa, synthetic construct
GSGQNIGHSLPQQT

SEQ ID NO: 696 - protein, 14 aa, synthetic construct
GSGERSISVQNQQT

SEQ ID NO: 697 - protein, 14 aa, synthetic construct
GSGLKPNVLQNQQT

SEQ ID NO: 698 - protein, 14 aa, synthetic construct
GSGQVAYAQGNQQT

SEQ ID NO: 699 - protein, 14 aa, synthetic construct
GSGQSSYGSGNQQT

SEQ ID NO: 700 - protein, 14 aa, synthetic construct
GSGQNQAMTHGDQT

SEQ ID NO: 701 - protein, 14 aa, synthetic construct
GSGQNQALVSMGQT

SEQ ID NO: 702 - protein, 14 aa, synthetic construct
GSGQNPSFMRGQQT

SEQ ID NO: 703 - protein, 14 aa, synthetic construct
GSGQNQQSHLRTNT

SEQ ID NO: 704 - protein, 14 aa, synthetic construct
GYTRLETSGQNQQT

SEQ ID NO: 705 - protein, 14 aa, synthetic construct
GSGQSYDMRGNQQT

SEQ ID NO: 706 - protein, 14 aa, synthetic construct
GSRTTQDIGQNQQT

SEQ ID NO: 707 - protein, 14 aa, synthetic construct
GSGHPYKAAQNQQT

SEQ ID NO: 708 - protein, 14 aa, synthetic construct
GRLSNAHGGQNQQT

SEQ ID NO: 709 - protein, 14 aa, synthetic construct
GSGQNQRAVLNDQT

SEQ ID NO: 710 - protein, 14 aa, synthetic construct
GGSHTYGGGQNQQT

SEQ ID NO: 711 - protein, 14 aa, synthetic construct
GSSVNSMIGQNQQT

SEQ ID NO: 712 - protein, 14 aa, synthetic construct
GNSSMMGSGQNQQT

SEQ ID NO: 713 - protein, 14 aa, synthetic construct
GNRDRPSSGQNQQT

SEQ ID NO: 714 - protein, 14 aa, synthetic construct
GSGNMHASRQNQQT

SEQ ID NO: 715 - protein, 14 aa, synthetic construct
GFIFPKVSGQNQQT

SEQ ID NO: 716 - protein, 14 aa, synthetic construct
GSGQNQQLKNSTST

SEQ ID NO: 717 - protein, 14 aa, synthetic construct
GSGQNQQSQYMPRT

SEQ ID NO: 718 - protein, 14 aa, synthetic construct
GSGQRMADIGNQQT

SEQ ID NO: 719 - protein, 14 aa, synthetic construct
GSGQNQSHYPSQQT

SEQ ID NO: 720 - protein, 14 aa, synthetic construct
GSDGKMHRGQNQQT

SEQ ID NO: 721 - protein, 14 aa, synthetic construct
GSGSVGFIGQNQQT

SEQ ID NO: 722 - protein, 14 aa, synthetic construct
GLHGMTLSGQNQQT

SEQ ID NO: 723 - protein, 14 aa, synthetic construct
GSDQSKRGDSNQQT

SEQ ID NO: 724 - protein, 14 aa, synthetic construct
GSLFLATGGQNQQT

SEQ ID NO: 725 - protein, 14 aa, synthetic construct
GSGQNQQPSAFSKT

SEQ ID NO: 726 - protein, 14 aa, synthetic construct
GSGQLPQSGLNQQT

SEQ ID NO: 727 - protein, 14 aa, synthetic construct
GSGSKQNALQNQQT

SEQ ID NO: 728 - protein, 14 aa, synthetic construct
GSGQRRELSQNQQT

SEQ ID NO: 729 - protein, 14 aa, synthetic construct
GSGQREPKASNQQT

SEQ ID NO: 730 - protein, 14 aa, synthetic construct
GSGQNQQHPSTQQT

SEQ ID NO: 731 - protein, 14 aa, synthetic construct
GSQSTLGLGQNQQT

SEQ ID NO: 732 - protein, 14 aa, synthetic construct
GSGQNQQMPGLSST

SEQ ID NO: 733 - protein, 14 aa, synthetic construct
GSGQNQQTVGGKNL

SEQ ID NO: 734 - protein, 14 aa, synthetic construct
GSSREFHSGQNQQT

SEQ ID NO: 735 - protein, 14 aa, synthetic construct
GSGQNQQTVPSNLV

SEQ ID NO: 736 - protein, 14 aa, synthetic construct
GSGQNAYSSQAQQT

SEQ ID NO: 737 - protein, 14 aa, synthetic construct
GSGQNKDHSTRRQT

SEQ ID NO: 738 - protein, 14 aa, synthetic construct
GQLGSVGSGQDQQT

SEQ ID NO: 739 - protein, 14 aa, synthetic construct
GSGQHAAPGHNQQT

SEQ ID NO: 740 - protein, 14 aa, synthetic construct
GSGQNQQTSQSPPT

SEQ ID NO: 741 - protein, 14 aa, synthetic construct
GSGNYRDHEQNQQT

SEQ ID NO: 742 - protein, 14 aa, synthetic construct
GSGQHSNQHVNQQT

SEQ ID NO: 743 - protein, 14 aa, synthetic construct
GSGQTARNGINQQT

SEQ ID NO: 744 - protein, 14 aa, synthetic construct
GSGQNQQHYGSQGT

SEQ ID NO: 745 - protein, 14 aa, synthetic construct
GSGSPQASRQNQQT

SEQ ID NO: 746 - protein, 14 aa, synthetic construct
GSGFSHSMGKNQQT

SEQ ID NO: 747 - protein, 14 aa, synthetic construct
GSGQSHSLETNQQT

SEQ ID NO: 748 - protein, 14 aa, synthetic construct
GTEQTRQSGQNQQT

SEQ ID NO: 749 - protein, 14 aa, synthetic construct
GSGRHLASVQNQQT

SEQ ID NO: 750 - protein, 14 aa, synthetic construct
GLGSKNHSGQNQQT

SEQ ID NO: 751 - protein, 14 aa, synthetic construct
GSGQNQQTSHFPSA

SEQ ID NO: 752 - protein, 14 aa, synthetic construct
GSGQLSGTPQNQQT

SEQ ID NO: 753 - protein, 14 aa, synthetic construct
GSGQNQQAPHKKET

SEQ ID NO: 754 - protein, 14 aa, synthetic construct
GSGQNQQTLRGSLE

SEQ ID NO: 755 - protein, 14 aa, synthetic construct
GSIAMTSHGQNQQT

SEQ ID NO: 756 - protein, 14 aa, synthetic construct
GSPGVSPSGQNQQT

SEQ ID NO: 757 - protein, 14 aa, synthetic construct
GSGQNQQTGSSSRV

SEQ ID NO: 758 - protein, 14 aa, synthetic construct
GSGQHLPLLGNQQT

SEQ ID NO: 759 - protein, 14 aa, synthetic construct
GSDHSHRGGQNQQT

SEQ ID NO: 760 - protein, 14 aa, synthetic construct
GSGIVTKLGQNQQT

SEQ ID NO: 761 - protein, 14 aa, synthetic construct
GSGQDVTKTGNQQT

SEQ ID NO: 762 - protein, 14 aa, synthetic construct
GSGQNQQSHGRIGT

SEQ ID NO: 763 - protein, 14 aa, synthetic construct
GSGQNQQINHRSPT

SEQ ID NO: 764 - protein, 14 aa, synthetic construct
GSGDDSRVGQNQQT

SEQ ID NO: 765 - protein, 14 aa, synthetic construct
GSGQSTLKRINQQT

SEQ ID NO: 766 - protein, 14 aa, synthetic construct
GSGSQHSKAQNQQT

SEQ ID NO: 767 - protein, 14 aa, synthetic construct
GSGQNQQHASSNNT

SEQ ID NO: 768 - protein, 14 aa, synthetic construct
GSRTYQVSGQNQQT

SEQ ID NO: 769 - protein, 14 aa, synthetic construct
GSGQNQGLLSSPQT

SEQ ID NO: 770 - protein, 14 aa, synthetic construct
GSGGGLQHNQNQQT

SEQ ID NO: 771 - protein, 14 aa, synthetic construct
GSGQNQQTTAATRM

SEQ ID NO: 772 - protein, 14 aa, synthetic construct
GSGQNQRASILVQT

SEQ ID NO: 773 - protein, 14 aa, synthetic construct
GSGQNLGLLGAQQT

SEQ ID NO: 774 - protein, 14 aa, synthetic construct
GSLDLGRSGQNQQT

SEQ ID NO: 775 - protein, 14 aa, synthetic construct
GNSQVKVSGQNQQT

SEQ ID NO: 776 - protein, 14 aa, synthetic construct
GSSGSHQYGQNQQT

SEQ ID NO: 777 - protein, 14 aa, synthetic construct
GSGQNQQQRDGTLT

SEQ ID NO: 778 - protein, 14 aa, synthetic construct
GRGQHVSVANNQQT

SEQ ID NO: 779 - protein, 14 aa, synthetic construct
GDSSSRISGQNQQT

SEQ ID NO: 780 - protein, 14 aa, synthetic construct
GSGQNQQHSLSSQT

SEQ ID NO: 781 - protein, 14 aa, synthetic construct
GSLMDVHRGQNQQT

SEQ ID NO: 782 - protein, 14 aa, synthetic construct
GSIQYQSSGQNQQT

SEQ ID NO: 783 - protein, 14 aa, synthetic construct
GLGSKNPSGQNQQT

SEQ ID NO: 784 - protein, 14 aa, synthetic construct
GSGQLVLTLQNQQT

SEQ ID NO: 785 - protein, 14 aa, synthetic construct
GSGQNQQTSQPLPG

SEQ ID NO: 786 - protein, 14 aa, synthetic construct
GSGQNQQNLGKLNT

SEQ ID NO: 787 - protein, 14 aa, synthetic construct
GTTAHQPSGQNQQT

SEQ ID NO: 788 - protein, 14 aa, synthetic construct
GSGQNRAQIGTQQT

SEQ ID NO: 789 - protein, 14 aa, synthetic construct
GSGQYVHVSSNQQT

SEQ ID NO: 790 - protein, 14 aa, synthetic construct
GSGQNQQTAHAFNI

SEQ ID NO: 791 - protein, 14 aa, synthetic construct
GSGQNQRTMVATQT

SEQ ID NO: 792 - protein, 14 aa, synthetic construct
GSGQNPIRGAMQQT

SEQ ID NO: 793 - protein, 14 aa, synthetic construct
GSGYVITGSQNQQT

SEQ ID NO: 794 - protein, 14 aa, synthetic construct
GRGPKQSNIQNQQT

SEQ ID NO: 795 - protein, 14 aa, synthetic construct
GSGQNQQTMLGKPC

SEQ ID NO: 796 - protein, 14 aa, synthetic construct
GSGQNQQVGSTVRT

SEQ ID NO: 797 - protein, 14 aa, synthetic construct
GNVTTQKSGQNQQT

SEQ ID NO: 798 - protein, 14 aa, synthetic construct
GSGNPVSHLQNQQT

SEQ ID NO: 799 - protein, 14 aa, synthetic construct
GSLSHMESGQNQQT

SEQ ID NO: 800 - protein, 14 aa, synthetic construct
GRAPTNLSGQNQQT

SEQ ID NO: 801 - protein, 14 aa, synthetic construct
GSGQNQQTVMTARA

SEQ ID NO: 802 - protein, 14 aa, synthetic construct
GSGMPASRLQNQQT

SEQ ID NO: 803 - protein, 14 aa, synthetic construct
GVVRNHQSGQNQQT

SEQ ID NO: 804 - protein, 14 aa, synthetic construct
GSGQNQHSVQVRQT

SEQ ID NO: 805 - protein, 14 aa, synthetic construct
GSGQNTGHLTMQQT

SEQ ID NO: 806 - protein, 14 aa, synthetic construct
GSGQNQQYAGKILT

SEQ ID NO: 807 - protein, 14 aa, synthetic construct
GSGNPHVRNQNQQT

SEQ ID NO: 808 - protein, 14 aa, synthetic construct
GSGQNGGSSNRQQT

SEQ ID NO: 809 - protein, 14 aa, synthetic construct
GSGQRLSQGVNHQT

SEQ ID NO: 810 - protein, 14 aa, synthetic construct
GSGQNAHAKEGQQT

SEQ ID NO: 811 - protein, 14 aa, synthetic construct
GSSPAPNSGQNQQT

SEQ ID NO: 812 - protein, 14 aa, synthetic construct
GLAHKTSSGQNQQT

SEQ ID NO: 813 - protein, 14 aa, synthetic construct
GSGQNQQTPGAHKT

SEQ ID NO: 814 - protein, 14 aa, synthetic construct
GSGQNQQSLSGSFT

SEQ ID NO: 815 - protein, 14 aa, synthetic construct
GSGQNQQSTGTSRT

SEQ ID NO: 816 - protein, 14 aa, synthetic construct
GSGQNQQTVQSNLV

SEQ ID NO: 817 - protein, 14 aa, synthetic construct
GSGQNQQLGSRQCT

SEQ ID NO: 818 - protein, 14 aa, synthetic construct
GSGQNQYLRLELQT

SEQ ID NO: 819 - protein, 14 aa, synthetic construct
GSGQNQQTSPRLQT

SEQ ID NO: 820 - protein, 14 aa, synthetic construct
GSGQNQQTTSSNMT

SEQ ID NO: 821 - protein, 14 aa, synthetic construct
GTASTYNSGQNQQT

SEQ ID NO: 822 - protein, 14 aa, synthetic construct
GSGQNQQTMPQHKI

SEQ ID NO: 823 - protein, 14 aa, synthetic construct
GSGQSHLHTGNQQT

SEQ ID NO: 824 - protein, 14 aa, synthetic construct
GVKGVGHSGQNQQT

SEQ ID NO: 825 - protein, 14 aa, synthetic construct
GSGKVTKQSQNQQT

SEQ ID NO: 826 - protein, 14 aa, synthetic construct
GSGQNQQTALEKSL

SEQ ID NO: 827 - protein, 14 aa, synthetic construct
GSGYKDTYGQNQQT

SEQ ID NO: 828 - protein, 14 aa, synthetic construct
GSGQNQQSGTFLST

SEQ ID NO: 829 - protein, 14 aa, synthetic construct
GSGQNTGQHMMQQT

SEQ ID NO: 830 - protein, 14 aa, synthetic construct
GSGKNQQRPGLDQT

SEQ ID NO: 831 - protein, 14 aa, synthetic construct
GSGQSREISLNQQT

SEQ ID NO: 832 - protein, 14 aa, synthetic construct
GTPTSPSSGQNQQT

SEQ ID NO: 833 - protein, 14 aa, synthetic construct
GKPAGGLSGQNQQT

SEQ ID NO: 834 - protein, 14 aa, synthetic construct
GSGQNHRSADMQQT

SEQ ID NO: 835 - protein, 14 aa, synthetic construct
GSGQNQQTLPSLSL

SEQ ID NO: 836 - protein, 14 aa, synthetic construct
GSPYMGATGQNQQT

SEQ ID NO: 837 - protein, 14 aa, synthetic construct
GSGHAKAVGQNQQT

SEQ ID NO: 838 - protein, 14 aa, synthetic construct
GHMKGVTSGQNQQT

SEQ ID NO: 839 - protein, 14 aa, synthetic construct
GSGQNQKILTLDQT

SEQ ID NO: 840 - protein, 14 aa, synthetic construct
GSGQNQQTKVGHSA

SEQ ID NO: 841 - protein, 14 aa, synthetic construct
GIARTTISGQNQQT

SEQ ID NO: 842 - protein, 14 aa, synthetic construct
GSGQNQQTSVGFRT

SEQ ID NO: 843 - protein, 14 aa, synthetic construct
GSGQNQQTMIANIR

SEQ ID NO: 844 - protein, 14 aa, synthetic construct
GDMTRSSSGQNQQT

SEQ ID NO: 845 - protein, 14 aa, synthetic construct
GSGHMSDLRQNQQT

SEQ ID NO: 846 - protein, 14 aa, synthetic construct
GRGAVMASGQNQQT

SEQ ID NO: 847 - protein, 14 aa, synthetic construct
GSGQNQQLSGKSVT

SEQ ID NO: 848 - protein, 14 aa, synthetic construct
GSHTLVVSGQNQQT

SEQ ID NO: 849 - protein, 14 aa, synthetic construct
GSGPWSAGLQNQQT

SEQ ID NO: 850 - protein, 14 aa, synthetic construct
GSGQHSPHALNQQT

SEQ ID NO: 851 - protein, 14 aa, synthetic construct
GSGQNQQPNSGSMT

SEQ ID NO: 852 - protein, 14 aa, synthetic construct
GSGLAHLGGQNQQT

SEQ ID NO: 853 - protein, 14 aa, synthetic construct
GSSVRYEPKQNQQT

SEQ ID NO: 854 - protein, 14 aa, synthetic construct
GSGQNQQARPLELT

SEQ ID NO: 855 - protein, 14 aa, synthetic construct
GSGQPRSTGINQQT

SEQ ID NO: 856 - protein, 14 aa, synthetic construct
GSGQNQANWVKVQT

SEQ ID NO: 857 - protein, 14 aa, synthetic construct
GSGHLFQSGQNQQT

SEQ ID NO: 858 - protein, 14 aa, synthetic construct
GSGQNRGISISQQT

SEQ ID NO: 859 - protein, 14 aa, synthetic construct
GSGTHYDNRQNQQT

SEQ ID NO: 860 - protein, 14 aa, synthetic construct
GSGQNQQTSTTPLP

SEQ ID NO: 861 - protein, 14 aa, synthetic construct
GSGQVHASQVNQKT

SEQ ID NO: 862 - protein, 14 aa, synthetic construct
GSSGHRESGQNQQT

SEQ ID NO: 863 - protein, 14 aa, synthetic construct
GLSAEKSSGQNQQT

SEQ ID NO: 864 - protein, 14 aa, synthetic construct
GSGQEHRSLANQQT

SEQ ID NO: 865 - protein, 14 aa, synthetic construct
GSGQTVVRIANQQT

SEQ ID NO: 866 - protein, 14 aa, synthetic construct
GSGQNVSSVHRQQT

SEQ ID NO: 867 - protein, 14 aa, synthetic construct
GSGASRMSIQNQQT

SEQ ID NO: 868 - protein, 14 aa, synthetic construct
GVAFIGSSGQNQQT

SEQ ID NO: 869 - protein, 14 aa, synthetic construct
GSGQNQQTVPTRQT

SEQ ID NO: 870 - protein, 14 aa, synthetic construct
GSGQAAKSSQNQQT

SEQ ID NO: 871 - protein, 14 aa, synthetic construct
GSGQNQQVAIRTST

SEQ ID NO: 872 - protein, 14 aa, synthetic construct
GSVHMQNAGQNQQT

SEQ ID NO: 873 - protein, 14 aa, synthetic construct
GSGMRQAGVQNQQT

SEQ ID NO: 874 - protein, 14 aa, synthetic construct
GSGQNQQVGGKTVT

SEQ ID NO: 875 - protein, 14 aa, synthetic construct
GVHDMRVSGQNQQT

SEQ ID NO: 876 - protein, 14 aa, synthetic construct
GSGQHVSVANNQQT

SEQ ID NO: 877 - protein, 14 aa, synthetic construct
GSAAMSVRGQNQQT

SEQ ID NO: 878 - protein, 14 aa, synthetic construct
GVSRGGPSGQNQQT

SEQ ID NO: 879 - protein, 14 aa, synthetic construct
GSGQMVHTIGNQQT

SEQ ID NO: 880 - protein, 14 aa, synthetic construct
GRGGSMAETQNQQT

SEQ ID NO: 881 - protein, 14 aa, synthetic construct
GSGHTNPTRQNQQT

SEQ ID NO: 882 - protein, 14 aa, synthetic construct
GSGEAARYEQNQQT

SEQ ID NO: 883 - protein, 14 aa, synthetic construct
GSGQNERHLVLQQT

SEQ ID NO: 884 - protein, 14 aa, synthetic construct
GSGQNQQSKQQVLT

SEQ ID NO: 885 - protein, 14 aa, synthetic construct
GSGQARAHRGNQQT

SEQ ID NO: 886 - protein, 14 aa, synthetic construct
GSGQNQQPLDTSRT

SEQ ID NO: 887 - protein, 14 aa, synthetic construct
GSGQNQQLANMVTT

SEQ ID NO: 888 - protein, 14 aa, synthetic construct
GSGQMKDLHRNQQT

SEQ ID NO: 889 - protein, 14 aa, synthetic construct
GSGQNQHLSSFVQT

SEQ ID NO: 890 - protein, 14 aa, synthetic construct
GSGQNQQPSSRVTT

SEQ ID NO: 891 - protein, 14 aa, synthetic construct
GSGQNQQLAITLGT

SEQ ID NO: 892 - protein, 14 aa, synthetic construct
GSGQNQQTVGNPAT

SEQ ID NO: 893 - protein, 14 aa, synthetic construct
GSGQNQGRAHPMQT

SEQ ID NO: 894 - protein, 14 aa, synthetic construct
GSGQLIASVVNQQT

SEQ ID NO: 895 - protein, 14 aa, synthetic construct
GSSVRSLVGQNQQT

SEQ ID NO: 896 - protein, 14 aa, synthetic construct
GGAGSAHSGQNQQT

SEQ ID NO: 897 - protein, 14 aa, synthetic construct
GSDQNQQTMSSTRT

SEQ ID NO: 898 - protein, 14 aa, synthetic construct
GSGQNQQMAGAFRT

SEQ ID NO: 899 - protein, 14 aa, synthetic construct
GSLGNLQRGQNQQT

SEQ ID NO: 900 - protein, 14 aa, synthetic construct
GSGPSISHGQNQQT

SEQ ID NO: 901 - protein, 14 aa, synthetic construct
GSGQNQQSSFNVQT

SEQ ID NO: 902 - protein, 14 aa, synthetic construct
GSGQNQQTGQATHN

SEQ ID NO: 903 - protein, 14 aa, synthetic construct
VSGSPHSKAQNQQT

SEQ ID NO: 904 - protein, 14 aa, synthetic construct
CSGSPHSKAQNQQT

SEQ ID NO: 905 - protein, 14 aa, synthetic construct
GSGSPHRKAQNQQT

SEQ ID NO: 906 - protein, 14 aa, synthetic construct
GRGSPHSKAQNQQT

SEQ ID NO: 907 - protein, 14 aa, synthetic construct
GSGSPHSKAQNKQT

SEQ ID NO: 908 - protein, 14 aa, synthetic construct
GSGSPHSKAQTQQT

SEQ ID NO: 909 - protein, 14 aa, synthetic construct
GSGSTHASRQNQQT

SEQ ID NO: 910 - protein, 14 aa, synthetic construct
GSGSPHKYGQNQQT

SEQ ID NO: 911 - protein, 14 aa, synthetic construct
GSGSPHKFGQNQQT

SEQ ID NO: 912 - protein, 14 aa, synthetic construct
VSGSPHKFGQNQQT

SEQ ID NO: 913 - protein, 14 aa, synthetic construct
GSGSPHSKAQNHQT

SEQ ID NO: 914 - protein, 14 aa, synthetic construct
GSGSPHSKAQHQQT

SEQ ID NO: 915 - protein, 14 aa, synthetic construct
GSGSPHKTYQNQQT

SEQ ID NO: 916 - protein, 14 aa, synthetic construct
VSGSPHASRQNQQT

SEQ ID NO: 917 - protein, 14 aa, synthetic construct
GSGSPHKFGKNQQT

SEQ ID NO: 918 - protein, 14 aa, synthetic construct
GSGSPHASRQNQHT

SEQ ID NO: 919 - protein, 14 aa, synthetic construct
GSHSPHKSGQNQQT

SEQ ID NO: 920 - protein, 14 aa, synthetic construct
GSGQNQQRRMSPST

SEQ ID NO: 921 - protein, 14 aa, synthetic construct
GSGSPHSKPQNQQT

SEQ ID NO: 922 - protein, 14 aa, synthetic construct
GSGSPHKFGQKQQT

SEQ ID NO: 923 - protein, 14 aa, synthetic construct
VSGSPHGARQNQQT

SEQ ID NO: 924 - protein, 14 aa, synthetic construct
GSGSPHSKAQKQQT

SEQ ID NO: 925 - protein, 14 aa, synthetic construct
GSHSPHKRGQNQQT

SEQ ID NO: 926 - protein, 14 aa, synthetic construct
GSGQNRQRLKGLET

SEQ ID NO: 927 - protein, 14 aa, synthetic construct
GSGSPHKLGQNQQT

SEQ ID NO: 928 - protein, 14 aa, synthetic construct
GSGSPHKTSKNQQT

SEQ ID NO: 929 - protein, 14 aa, synthetic construct
GSGSPHKIGQNQQT

SEQ ID NO: 930 - protein, 14 aa, synthetic construct
GSGQDSPHVRNQQT

SEQ ID NO: 931 - protein, 14 aa, synthetic construct
GSGSPHKTSQNQQT

SEQ ID NO: 932 - protein, 14 aa, synthetic construct
GSGSPHASRKNQQT

SEQ ID NO: 933 - protein, 14 aa, synthetic construct
GSHSPHKSGQKQQT

SEQ ID NO: 934 - protein, 14 aa, synthetic construct
GSGSPHKTSQKQQT

SEQ ID NO: 935 - protein, 14 aa, synthetic construct
GSGSPHVRGQNKQT

SEQ ID NO: 936 - protein, 14 aa, synthetic construct
GSGSPHKTTQNQQT

SEQ ID NO: 937 - protein, 14 aa, synthetic construct
GSGPVRALRQNQQT

SEQ ID NO: 938 - protein, 14 aa, synthetic construct
GSGSPHVRGQKQQT

SEQ ID NO: 939 - protein, 14 aa, synthetic construct
CSGSPHKTSQNQQT

SEQ ID NO: 940 - protein, 14 aa, synthetic construct
CSHSPHKSGQNQQT

SEQ ID NO: 941 - protein, 6 aa, synthetic construct
SPHSKA

SEQ ID NO: 942 - DNA, 18 bp, synthetic construct
  source 1..18: mol_type = other DNA
agcccacacagcaaagca

SEQ ID NO: 943 - protein, 8 aa, synthetic construct
HDSPHKSG

SEQ ID NO: 944 - DNA, 24 bp, synthetic construct
  source 1..24: mol_type = other DNA
cacgacagcccacacaaaagcgga

SEQ ID NO: 945 - protein, 6 aa, synthetic construct
SPHSKA

SEQ ID NO: 946 - protein, 6 aa, synthetic construct
SPHKSG

SEQ ID NO: 947 - protein, 6 aa, synthetic construct
SPHARM

SEQ ID NO: 948 - protein, 6 aa, synthetic construct
SPHVKS

SEQ ID NO: 949 - protein, 6 aa, synthetic construct
SPHASR

SEQ ID NO: 950 - protein, 6 aa, synthetic construct
SPHVKI

SEQ ID NO: 951 - protein, 6 aa, synthetic construct
SPHKSR

SEQ ID NO: 952 - protein, 6 aa, synthetic construct
SPHSLR

SEQ ID NO: 953 - protein, 6 aa, synthetic construct
SPHSKW

SEQ ID NO: 954 - protein, 6 aa, synthetic construct
SPHKKN

SEQ ID NO: 955 - protein, 6 aa, synthetic construct
SPHVRM

SEQ ID NO: 956 - protein, 6 aa, synthetic construct
SPHRKA

SEQ ID NO: 957 - protein, 6 aa, synthetic construct
SPHKFG

SEQ ID NO: 958 - protein, 6 aa, synthetic construct
SPHKIG

SEQ ID NO: 959 - protein, 6 aa, synthetic construct
SPHKLG

SEQ ID NO: 960 - protein, 6 aa, synthetic construct
SPHSKL

SEQ ID NO: 961 - protein, 6 aa, synthetic construct
SPHSRG

SEQ ID NO: 962 - protein, 6 aa, synthetic construct
SPHSKS

SEQ ID NO: 963 - protein, 6 aa, synthetic construct
SPHKTS

SEQ ID NO: 964 - protein, 6 aa, synthetic construct
SPHKTT

SEQ ID NO: 965 - protein, 6 aa, synthetic construct
SPHKTY

SEQ ID NO: 966 - protein, 6 aa, synthetic construct
SPHKYG

SEQ ID NO: 967 - protein, 6 aa, synthetic construct
SPHSKD

SEQ ID NO: 968 - protein, 6 aa, synthetic construct
SPHSKP

SEQ ID NO: 969 - protein, 6 aa, synthetic construct
SPHSRA

SEQ ID NO: 970 - protein, 6 aa, synthetic construct
SPHSSR

SEQ ID NO: 971 - protein, 6 aa, synthetic construct
SPHWKA

SEQ ID NO: 972 - protein, 6 aa, synthetic construct
SPHTRG

SEQ ID NO: 973 - protein, 6 aa, synthetic construct
SPHVRG

SEQ ID NO: 974 - protein, 6 aa, synthetic construct
SPHKRG

SEQ ID NO: 975 - protein, 6 aa, synthetic construct
SPHGAR

SEQ ID NO: 976 - protein, 6 aa, synthetic construct
SPHRSG

SEQ ID NO: 977 - protein, 6 aa, synthetic construct
SPHKSA

SEQ ID NO: 978 - protein, 6 aa, synthetic construct
SPHSKR

SEQ ID NO: 979 - protein, 6 aa, synthetic construct
SPHFLR

SEQ ID NO: 980 - protein, 6 aa, synthetic construct
SPHVRR

SEQ ID NO: 981 - protein, 742 aa, synthetic construct
MAADGYLPDWLEDNLSEGIREWWALKPGAPQPKANQQHQDNARGLVLPGYKYLGPGNGLDKGEPVNAADAAALEHDKAYDQQLKAGDNPYLKYNHADAEFQERLKEDTSFGGNLGRAVFQAKKRLLEPLGLVEEAAKTAPGKKRPVEQSPQEPDSSAGIGKSGAQPAKKRLNFGQTGDTESVPDPQPIGEPPAAPSGVGSLTMASGGGAPVADNNEGADGVGSSSGNWHCDSQWLGDRVITTSTRTWALPTYNNHLYKQISNSTSGGSSNDNAYFGYSTPWGYFDFNRFHCHFSPRDWQRLINNNWGFRPKRLNFKLFNIQVKEVTDNNGVKTIANNLTSTVQVFTDSDYQLPYVLGSAHEGCLPPFPADVFMIPQYGYLTLNDGSQAVGRSSFYCLEYFPSQMLRTGNNFQFSYEFENVPFHSSYAHSQSLDRLMNPLIDQYLYYLSKTINGSGSPHSKAQNQQTLKFSVAGPSNMAVQGRNYIPGPSYRQQRVSTTVTQNNNSEFAWPGASSWALNGRNSLMNPGPAMASHKEGEDRFFPLSGSLIFGKQGTGRDNVDADKVMITNEEEIKTTNPVATESYGQVATNHQSAQAQAQTGWVQNQGILPGMVWQDRDVYLQGPIWAKIPHTDGNFHPSPLMGGFGMKHPPPQILIKNTPVPADPPTAFNKDKLNSFITQYSTGQVSVEIEWELQKENSKRWNPEIQYTSNYYKSNNVEFAVNTEGVYSEPRPIGTRYLTRNL

SEQ ID NO: 982 - protein, 742 aa, synthetic construct
MAADGYLPDWLEDNLSEGIREWWALKPGAPQPKANQQHQDNARGLVLPGYKYLGPGNGLDKGEPVNAADAAALEHDKAYDQQLKAGDNPYLKYNHADAEFQERLKEDTSFGGNLGRAVFQAKKRLLEPLGLVEEAAKTAPGKKRPVEQSPQEPDSSAGIGKSGAQPAKKRLNFGQTGDTESVPDPQPIGEPPAAPSGVGSLTMASGGGAPVADNNEGADGVGSSSGNWHCDSQWLGDRVITTSTRTWALPTYNNHLYKQISNSTSGGSSNDNAYFGYSTPWGYFDFNRFHCHFSPRDWQRLINNNWGFRPKRLNFKLFNIQVKEVTDNNGVKTIANNLTSTVQVFTDSDYQLPYVLGSAHEGCLPPFPADVFMIPQYGYLTLNDGSQAVGRSSFYCLEYFPSQMLRTGNNFQFSYEFENVPFHSSYAHSQSLDRLMNPLIDQYLYYLSKTINGHDSPHKSGQNQQTLKFSVAGPSNMAVQGRNYIPGPSYRQQRVSTTVTQNNNSEFAWPGASSWALNGRNSLMNPGPAMASHKEGEDRFFPLSGSLIFGKQGTGRDNVDADKVMITNEEEIKTTNPVATESYGQVATNHQSAQAQAQTGWVQNQGILPGMVWQDRDVYLQGPIWAKIPHTDGNFHPSPLMGGFGMKHPPPQILIKNTPVPADPPTAFNKDKLNSFITQYSTGQVSVEIEWELQKENSKRWNPEIQYTSNYYKSNNVEFAVNTEGVYSEPRPIGTRYLTRNL

SEQ ID NO: 983 - DNA, 2229 bp, synthetic construct
  source 1..2229: mol_type = other DNA
atggctgccgatggttatcttccagattggctcgaggacaaccttagtgaaggaattcgcgagtggtgggctttgaaacctggagcccctcaacccaaggcaaatcaacaacatcaagacaacgctcgaggtcttgtgcttccgggttacaaataccttggacccggcaacggactcgacaagggggagccggtcaacgcagcagacgcggcggccctcgagcacgacaaggcctacgaccagcagctcaaggccggagacaacccgtacctcaagtacaaccacgccgacgccgagttccaggagcggctcaaagaagatacgtcttttgggggcaacctcgggcgagcagtcttccaggccaaaaagaggcttcttgaacctcttggtctggttgaggaagcggctaagacggctcctggaaagaagaggcctgtagagcagtctcctcaggaaccggactcctccgcgggtattggcaaatcgggtgcacagcccgctaaaaagagactcaatttcggtcagactggcgacacagagtcagtcccagaccctcaaccaatcggagaacctcccgcagccccctcaggtgtgggatctcttacaatggcttcaggtggtggcgcaccagtggcagacaataacgaaggtgccgatggagtgggtagttcctcgggaaattggcattgcgattcccaatggctgggggacagagtcatcaccaccagcacccgaacctgggccctgcccacctacaacaatcacctctacaagcaaatctccaacagcacatctggaggatcttcaaatgacaacgcctacttcggctacagcaccccctgggggtattttgacttcaacagattccactgccacttctcaccacgtgactggcagcgactcatcaacaacaactggggattccggcctaagcgactcaacttcaagctcttcaacattcaggtcaaagaggttacggacaacaatggagtcaagaccatcgccaataaccttaccagcacggtccaggtcttcacggactcagactatcagctcccgtacgtgctcgggtcggctcacgagggctgcctcccgccgttcccagcggacgttttcatgattcctcagtacgggtatctgacgcttaatgatggaagccaggccgtgggtcgttcgtccttttactgcctggaatatttcccgtcgcaaatgctaagaacgggtaacaacttccagttcagctacgagtttgagaacgtacctttccatagcagctacgctcacagccaaagcctggaccgactaatgaatccactcatcgaccaatacttgtattacttgagtaaaacaattaacggaagcggaagcccacacagcaaagcacaaaaccaacagaccttgaagttttcggtagctggtcctagcaacatggctgtccagggaagaaactacatacctggacccagctaccgacaacaacgtgtctcaaccactgtgactcaaaacaacaacagcgaatttgcttggcctggagcttcttcttgggctctcaatggacgtaatagcttgatgaatcctggacctgctatggccagccacaaagaaggagaggaccgtttctttcctttgtctggatctttaatttttggcaaacaaggaactggaagagacaacgtggatgcggacaaagtcatgataaccaacgaagaagaaattaaaactactaacccggtagcaacggagtcctatggacaagtggccacaaaccaccagagtgcccaagcacaggcgcagaccggctgggttcaaaaccaaggaatacttccgggtatggtttggcaggacagagatgtgtacctgcaaggacccatttgggccaaaattcctcacacggacggcaactttcacccttctccgctgatgggagggtttggaatgaagcacccgcctcctcagatcctcatcaaaaacacacctgtacctgcggatcctccaacggccttcaacaaggacaagctgaactctttcatcacccagtattctactggccaagtcagcgtggagatcgagtgggagctgcagaaggaaaacagcaagcgctggaacccggagatccagtacacttccaactattacaagtctaataatgttgaatttgctgttaatactgaaggtgtatatagtgaaccccgccccattggcacgcggtatttaacgaggaacttataa

SEQ ID NO: 984 - DNA, 2229 bp, synthetic construct
  source 1..2229: mol_type = other DNA
atggctgccgatggttatcttccagattggctcgaggacaaccttagtgaaggaattcgcgagtggtgggctttgaaacctggagcccctcaacccaaggcaaatcaacaacatcaagacaacgctcgaggtcttgtgcttccgggttacaaataccttggacccggcaacggactcgacaagggggagccggtcaacgcagcagacgcggcggccctcgagcacgacaaggcctacgaccagcagctcaaggccggagacaacccgtacctcaagtacaaccacgccgacgccgagttccaggagcggctcaaagaagatacgtcttttgggggcaacctcgggcgagcagtcttccaggccaaaaagaggcttcttgaacctcttggtctggttgaggaagcggctaagacggctcctggaaagaagaggcctgtagagcagtctcctcaggaaccggactcctccgcgggtattggcaaatcgggtgcacagcccgctaaaaagagactcaatttcggtcagactggcgacacagagtcagtcccagaccctcaaccaatcggagaacctcccgcagccccctcaggtgtgggatctcttacaatggcttcaggtggtggcgcaccagtggcagacaataacgaaggtgccgatggagtgggtagttcctcgggaaattggcattgcgattcccaatggctgggggacagagtcatcaccaccagcacccgaacctgggccctgcccacctacaacaatcacctctacaagcaaatctccaacagcacatctggaggatcttcaaatgacaacgcctacttcggctacagcaccccctgggggtattttgacttcaacagattccactgccacttctcaccacgtgactggcagcgactcatcaacaacaactggggattccggcctaagcgactcaacttcaagctcttcaacattcaggtcaaagaggttacggacaacaatggagtcaagaccatcgccaataaccttaccagcacggtccaggtcttcacggactcagactatcagctcccgtacgtgctcgggtcggctcacgagggctgcctcccgccgttcccagcggacgttttcatgattcctcagtacgggtatctgacgcttaatgatggaagccaggccgtgggtcgttcgtccttttactgcctggaatatttcccgtcgcaaatgctaagaacgggtaacaacttccagttcagctacgagtttgagaacgtacctttccatagcagctacgctcacagccaaagcctggaccgactaatgaatccactcatcgaccaatacttgtattacttgagtaaaacaattaacggacacgacagcccacacaaaagcggacaaaaccaacagaccttgaagttttcggtagctggtcctagcaacatggctgtccagggaagaaactacatacctggacccagctaccgacaacaacgtgtctcaaccactgtgactcaaaacaacaacagcgaatttgcttggcctggagcttcttcttgggctctcaatggacgtaatagcttgatgaatcctggacctgctatggccagccacaaagaaggagaggaccgtttctttcctttgtctggatctttaatttttggcaaacaaggaactggaagagacaacgtggatgcggacaaagtcatgataaccaacgaagaagaaattaaaactactaacccggtagcaacggagtcctatggacaagtggccacaaaccaccagagtgcccaagcacaggcgcagaccggctgggttcaaaaccaaggaatacttccgggtatggtttggcaggacagagatgtgtacctgcaaggacccatttgggccaaaattcctcacacggacggcaactttcacccttctccgctgatgggagggtttggaatgaagcacccgcctcctcagatcctcatcaaaaacacacctgtacctgcggatcctccaacggccttcaacaaggacaagctgaactctttcatcacccagtattctactggccaagtcagcgtggagatcgagtgggagctgcagaaggaaaacagcaagcgctggaacccggagatccagtacacttccaactattacaagtctaataatgttgaatttgctgttaatactgaaggtgtatatagtgaaccccgccccattggcacgcggtatttaacgaggaacttataa

SEQ ID NO: 985 - protein, 6 aa, synthetic construct
STHASR

SEQ ID NO: 986 - protein, 6 aa, synthetic construct
SQHKSG

SEQ ID NO: 987 - DNA, 1184 bp, synthetic construct
  source 1..1184: mol_type = other DNA
cgtgaggctccggtgcccgtcagtgggcagagcgcacatcgcccacagtccccgagaagttggggggaggggtcggcaattgaaccggtgcctagagaaggtggcgcggggtaaactgggaaagtgatgtcgtgtactggctccgcctttttcccgagggtgggggagaaccgtatataagtgcagtagtcgccgtgaacgttctttttcgcaacgggtttgccgccagaacacaggtaagtgccgtgtgtggttcccgcgggcctggcctctttacgggttatggcccttgcgtgccttgaattacttccacctggctgcagtacgtgattcttgatcccgagcttcgggttggaagtgggtgggagagttcgaggccttgcgcttaaggagccccttcgcctcgtgcttgagttgaggcctggcctgggcgctggggccgccgcgtgcgaatctggtggcaccttcgcgcctgtctcgctgctttcgataagtctctagccatttaaaatttttgatgacctgctgcgacgctttttttctggcaagatagtcttgtaaatgcgggccaagatctgcacactggtatttcggtttttggggccgcgggcggcgacggggcccgtgcgtcccagcgcacatgttcggcgaggcggggcctgcgagcgcggccaccgagaatcggacgggggtagtctcaagctggccggcctgctctggtgcctggcctcgcgccgccgtgtatcgccccgccctgggcggcaaggctggcccggtcggcaccagttgcgtgagcggaaagatggccgcttcccggccctgctgcagggagctcaaaatggaggacgcggcgctcgggagagcgggcgggtgagtcacccacacaaaggaaaagggcctttccgtcctcagccgtcgcttcatgtgactccacggagtaccgggcgccgtccaggcacctcgattagttctcgagcttttggagtacgtcgtctttaggttggggggaggggttttatgcgatggagtttccccacactgagtgggtggagactgaagttaggccagcttggcacttgatgtaattctccttggaatttgccctttttgagtttggatcttggttcattctcaagcctcagacagtggttcaaagtttttttcttccatttcaggtgtcgtga

SEQ ID NO: 988 - DNA, 227 bp, synthetic construct
  source 1..227: mol_type = other DNA
gcccgtcagtgggcagagcgcacatcgcccacagtccccgagaagttggggggaggggtcggcaattgaaccggtgcctagagaaggtggcgcggggtaaactgggaaagtgatgtcgtgtactggctccgcctttttcccgagggtgggggagaaccgtatataagtgcagtagtcgccgtgaacgttctttttcgcaacgggtttgccgccagaacacgcgtaag

SEQ ID NO: 989 - skipped

SEQ ID NO: 990 - DNA, 16 bp, synthetic construct
  source 1..16: mol_type = other DNA
ggtggagaagagcatg

SEQ ID NO: 991 - DNA, 27 bp, synthetic construct
  source 1..27: mol_type = other DNA
gtcatcactgaggtggagaagagcatg

SEQ ID NO: 992-994 - skipped (3 entries)

SEQ ID NO: 995 - DNA, 222 bp, synthetic construct
  source 1..222: mol_type = other DNA
gcccgtcagtgggcagagcgcacatcgcccacagtccccgagaagttggggggaggggtcggcaattgaaccggtgcctagagaaggtggcgcggggtaaactgggaaagtgatgtcgtgtactggctccgcctttttcccgagggtgggggagaaccgtatataagtgcagtagtcgccgtgaacgttctttttcgcaacgggtttgccgccagaacacag

SEQ ID NO: 996 - DNA, 222 bp, synthetic construct
  source 1..222: mol_type = other DNA
gcccgtcagtgggcagagcgcacatcgcccacagtccccgagaagttggggggaggggtcggcaattgaaccggtgcctagagaaggtggcgcggggtaaactgggaaagtgatgtcgtgtactggctccgcctttttcccgagggtgggggagaaccgtatataagtgcagtagtcgccgtgaacgttctttttcgcaacgggtttgccgccagaacacgc

SEQ ID NO: 997 - skipped

SEQ ID NO: 998 - DNA, 229 bp, synthetic construct
  source 1..229: mol_type = other DNA
gtgcccgtcagtgggcagagcgcacatcgcccacagtccccgagaagttggggggaggggtcggcaattgaaccggtgcctagagaaggtggcgcggggtaaactgggaaagtgatgtcgtgtactggctccgcctttttcccgagggtgggggagaaccgtatataagtgcagtagtcgccgtgaacgttctttttcgcaacgggtttgccgccagaacacgcgtaag

SEQ ID NO: 999 - DNA, 235 bp, synthetic construct
  source 1..235: mol_type = other DNA
gctccggtgcccgtcagtgggcagagcgcacatcgcccacagtccccgagaagttggggggaggggtcggcaattgaaccggtgcctagagaaggtggcgcggggtaaactgggaaagtgatgtcgtgtactggctccgcctttttcccgagggtgggggagaaccgtatataagtgcagtagtcgccgtgaacgttctttttcgcaacgggtttgccgccagaacacgcgtaag

SEQ ID NO: 1000 - DNA, 241 bp, synthetic construct
  source 1..241: mol_type = other DNA
cgtgaggctccggtgcccgtcagtgggcagagcgcacatcgcccacagtccccgagaagttggggggaggggtcggcaattgaaccggtgcctagagaaggtggcgcggggtaaactgggaaagtgatgtcgtgtactggctccgcctttttcccgagggtgggggagaaccgtatataagtgcagtagtcgccgtgaacgttctttttcgcaacgggtttgccgccagaacacgcgtaag

SEQ ID NO: 1001 - DNA, 236 bp, synthetic construct
  source 1..236: mol_type = other DNA
cgtgaggctccggtgcccgtcagtgggcagagcgcacatcgcccacagtccccgagaagttggggggaggggtcggcaattgaaccggtgcctagagaaggtggcgcggggtaaactgggaaagtgatgtcgtgtactggctccgcctttttcccgagggtgggggagaaccgtatataagtgcagtagtcgccgtgaacgttctttttcgcaacgggtttgccgccagaacacag

SEQ ID NO: 1002 - DNA, 246 bp, synthetic construct
  source 1..246: mol_type = other DNA
gcatgcgtgaggctccggtgcccgtcagtgggcagagcgcacatcgcccacagtccccgagaagttggggggaggggtcggcaattgaaccggtgcctagagaaggtggcgcggggtaaactgggaaagtgatgtcgtgtactggctccgcctttttcccgagggtgggggagaaccgtatataagtgcagtagtcgccgtgaacgttctttttcgcaacgggtttgccgccagaacacgcgtaag

SEQ ID NO: 1003 - DNA, 241 bp, synthetic construct
  source 1..241: mol_type = other DNA
gcatgcgtgaggctccggtgcccgtcagtgggcagagcgcacatcgcccacagtccccgagaagttggggggaggggtcggcaattgaaccggtgcctagagaaggtggcgcggggtaaactgggaaagtgatgtcgtgtactggctccgcctttttcccgagggtgggggagaaccgtatataagtgcagtagtcgccgtgaacgttctttttcgcaacgggtttgccgccagaacacag

SEQ ID NO: 1004 - DNA, 257 bp, synthetic construct
  source 1..257: mol_type = other DNA
ggtggagaagagcatgcgtgaggctccggtgcccgtcagtgggcagagcgcacatcgcccacagtccccgagaagttggggggaggggtcggcaattgaaccggtgcctagagaaggtggcgcggggtaaactgggaaagtgatgtcgtgtactggctccgcctttttcccgagggtgggggagaaccgtatataagtgcagtagtcgccgtgaacgttctttttcgcaacgggtttgccgccagaacacgcgtaag

SEQ ID NO: 1005 - DNA, 252 bp, synthetic construct
  source 1..252: mol_type = other DNA
ggtggagaagagcatgcgtgaggctccggtgcccgtcagtgggcagagcgcacatcgcccacagtccccgagaagttggggggaggggtcggcaattgaaccggtgcctagagaaggtggcgcggggtaaactgggaaagtgatgtcgtgtactggctccgcctttttcccgagggtgggggagaaccgtatataagtgcagtagtcgccgtgaacgttctttttcgcaacgggtttgccgccagaacacag

SEQ ID NO: 1006 - DNA, 268 bp, synthetic construct
  source 1..268: mol_type = other DNA
gtcatcactgaggtggagaagagcatgcgtgaggctccggtgcccgtcagtgggcagagcgcacatcgcccacagtccccgagaagttggggggaggggtcggcaattgaaccggtgcctagagaaggtggcgcggggtaaactgggaaagtgatgtcgtgtactggctccgcctttttcccgagggtgggggagaaccgtatataagtgcagtagtcgccgtgaacgttctttttcgcaacgggtttgccgccagaacacgcgtaag

SEQ ID NO: 1007 - DNA, 263 bp, synthetic construct
  source 1..263: mol_type = other DNA
gtcatcactgaggtggagaagagcatgcgtgaggctccggtgcccgtcagtgggcagagcgcacatcgcccacagtccccgagaagttggggggaggggtcggcaattgaaccggtgcctagagaaggtggcgcggggtaaactgggaaagtgatgtcgtgtactggctccgcctttttcccgagggtgggggagaaccgtatataagtgcagtagtcgccgtgaacgttctttttcgcaacgggtttgccgccagaacacag

SEQ ID NO: 1008 - protein, 18 aa, synthetic construct
KTINGSGSPHSLLWNQQT

SEQ ID NO: 1009 - protein, 18 aa, synthetic construct
KTINGSGSPHSKAQYYVT

SEQ ID NO: 1010 - protein, 18 aa, synthetic construct
KTINGSGSPHSKLRRQQT

SEQ ID NO: 1011 - protein, 18 aa, synthetic construct
KTINGSGSPHSIWQNQQT

SEQ ID NO: 1012 - protein, 18 aa, synthetic construct
KTINGSSSPHCTAQNQQT

SEQ ID NO: 1013 - protein, 18 aa, synthetic construct
KTINGSGSPHSKAGCGQT

SEQ ID NO: 1014 - protein, 18 aa, synthetic construct
KSMNGSGSPHSRAQNQQT

SEQ ID NO: 1015 - protein, 18 aa, synthetic construct
KTINGSGSPHSKRLRQQT

SEQ ID NO: 1016 - protein, 18 aa, synthetic construct
KTINGSGSPHSLRRNQQT

SEQ ID NO: 1017 - protein, 18 aa, synthetic construct
KTINGSGSPHSRGRNQQT

SEQ ID NO: 1018 - protein, 18 aa, synthetic construct
KTINGSGSPHSEIVNQQT

SEQ ID NO: 1019 - protein, 18 aa, synthetic construct
KTINGSGSPHSSRRNQQT

SEQ ID NO: 1020 - protein, 18 aa, synthetic construct
KTINGSGSPHCLLQNQQT

SEQ ID NO: 1021 - protein, 18 aa, synthetic construct
KTIMRVGSPHSKAQNQQT

SEQ ID NO: 1022 - protein, 18 aa, synthetic construct
KTINGSGSPHSKAFRLQT

SEQ ID NO: 1023 - protein, 18 aa, synthetic construct
KTINGSGSPHCLAQNQQT

SEQ ID NO: 1024 - protein, 18 aa, synthetic construct
KTINGSCSPHRKAQNQQT

SEQ ID NO: 1025 - protein, 18 aa, synthetic construct
KTINGSGSPHFLRQNQQT

SEQ ID NO: 1026 - protein, 18 aa, synthetic construct
KTINGSGSPHSLRFNQQT

SEQ ID NO: 1027 - protein, 18 aa, synthetic construct
KTINGSGSPHSYLRNQQT

SEQ ID NO: 1028 - protein, 18 aa, synthetic construct
KTINGSGSPHCSLQNQQT

SEQ ID NO: 1029 - protein, 18 aa, synthetic construct
KTINGSGSPHVLWQNQQT

SEQ ID NO: 1030 - protein, 18 aa, synthetic construct
KTINGSGSPHSKWLLQQT

SEQ ID NO: 1031 - protein, 18 aa, synthetic construct
KTINGSGSPHSLWSNQQT

SEQ ID NO: 1032 - protein, 18 aa, synthetic construct
KTINGSGSPHSKRRLQQT

SEQ ID NO: 1033 - protein, 18 aa, synthetic construct
KTINGSGSPHSVYLNQQT

SEQ ID NO: 1034 - protein, 18 aa, synthetic construct
KTINGSGSPHSLWLNQQT

SEQ ID NO: 1035 - protein, 18 aa, synthetic construct
KTINGSGSPHSKAQRKLT

SEQ ID NO: 1036 - protein, 18 aa, synthetic construct
KTINGSGSPHSKALRRQT

SEQ ID NO: 1037 - protein, 18 aa, synthetic construct
KTINGSGSPHSKAQRLRT

SEQ ID NO: 1038 - protein, 18 aa, synthetic construct
KYLSGSGSPHSKAQNQQT

SEQ ID NO: 1039 - protein, 18 aa, synthetic construct
KTINGSGSPHSKAQRRLT

SEQ ID NO: 1040 - protein, 18 aa, synthetic construct
KTINGSGSPHSKARRQQT

SEQ ID NO: 1041 - protein, 18 aa, synthetic construct
KTINGSGSPHSKARRLQT

SEQ ID NO: 1042 - protein, 18 aa, synthetic construct
KTINGSGSPHSKSRRQQT

SEQ ID NO: 1043 - protein, 18 aa, synthetic construct
KTINGLLSPHWKAQNQQT

SEQ ID NO: 1044 - protein, 18 aa, synthetic construct
KTINGSGSPHSKARLRQT

SEQ ID NO: 1045 - protein, 18 aa, synthetic construct
KTINGSGSPHSKASKRQT

SEQ ID NO: 1046 - protein, 18 aa, synthetic construct
KTINGSGSPHVRRQNQQT

SEQ ID NO: 1047 - protein, 18 aa, synthetic construct
KTINGSGSPHSKAQLYRT

SEQ ID NO: 1048 - protein, 18 aa, synthetic construct
KGLSGSGSPHSKAQNQQT

SEQ ID NO: 1049 - protein, 18 aa, synthetic construct
KTINGSGSPHSLFRNQQT

SEQ ID NO: 1050 - protein, 18 aa, synthetic construct
KTINGSGSPHSKAQLTVT

SEQ ID NO: 1051 - protein, 18 aa, synthetic construct
KTINGSRSPHTRAQNQQT

SEQ ID NO: 1052 - protein, 18 aa, synthetic construct
KTINGSGSPHSKAKLRQT

SEQ ID NO: 1053 - protein, 18 aa, synthetic construct
KTINGSGSPHSKLIRQQT

SEQ ID NO: 1054 - protein, 18 aa, synthetic construct
KTINGSGSPHSKALRFQT

SEQ ID NO: 1055 - protein, 18 aa, synthetic construct
KTINGSGSPHSKRTFQQT

SEQ ID NO: 1056 - protein, 18 aa, synthetic construct
KTINGSGSPHSKAQKRLT

SEQ ID NO: 1057 - protein, 18 aa, synthetic construct
KTINGSGSPHLWSQNQQT

SEQ ID NO: 1058 - protein, 18 aa, synthetic construct
KTINGSGSPHLLWQNQQT

SEQ ID NO: 1059 - protein, 18 aa, synthetic construct
KTINGSGSPHSRLRNQQT

SEQ ID NO: 1060 - protein, 18 aa, synthetic construct
KTINGSGSPHSKRAAQQT

SEQ ID NO: 1061 - protein, 18 aa, synthetic construct
KTINGSGSPHSKRSWQQT

SEQ ID NO: 1062 - protein, 18 aa, synthetic construct
KTINGSGSPHSKAQLRRT

SEQ ID NO: 1063 - protein, 18 aa, synthetic construct
KTINGSGSPHYLVQNQQT

SEQ ID NO: 1064 - protein, 18 aa, synthetic construct
KTINGSGSPHSKLFRQQT

SEQ ID NO: 1065 - protein, 18 aa, synthetic construct
KTINGSGSPHSKRAMQQT

SEQ ID NO: 1066 - protein, 18 aa, synthetic construct
KTINGSGSPHSKTLRQQT

SEQ ID NO: 1067 - protein, 18 aa, synthetic construct
KTINGSGSPHSRSRNQQT

SEQ ID NO: 1068 - protein, 18 aa, synthetic construct
KTINGSGSPHRRRQNQQT

SEQ ID NO: 1069 - protein, 18 aa, synthetic construct
KTINGSGSPHSKTCLQQT

SEQ ID NO: 1070 - protein, 18 aa, synthetic construct
KTINGSGSPHSKSRWQQT

SEQ ID NO: 1071 - protein, 18 aa, synthetic construct
KTINGSGSPHRFRQNQQT

SEQ ID NO: 1072 - protein, 18 aa, synthetic construct
KTINGLRSPHRKAQNQQT

SEQ ID NO: 1073 - protein, 18 aa, synthetic construct
KTRSRSGSPHSKAQNQQT

SEQ ID NO: 1074 - protein, 18 aa, synthetic construct
KTINGSGSPHSKAQLVVT

SEQ ID NO: 1075 - protein, 18 aa, synthetic construct
KTINGSGSPHSRKLNQQT

SEQ ID NO: 1076 - protein, 18 aa, synthetic construct
KTINGSGSPHSLLCNQQT

SEQ ID NO: 1077 - protein, 18 aa, synthetic construct
KTINGKRSPHSKAQNQQT

SEQ ID NO: 1078 - protein, 18 aa, synthetic construct
KTINGSRSPHLFAQNQQT

SEQ ID NO: 1079 - protein, 18 aa, synthetic construct
KSINGSGSPHSKAHDQQT

SEQ ID NO: 1080 - protein, 18 aa, synthetic construct
KTINGSGSPHSKAQRSRT

SEQ ID NO: 1081 - protein, 18 aa, synthetic construct
KTINGSGSPHSTWLNQQT

SEQ ID NO: 1082 - protein, 18 aa, synthetic construct
KTINGSGSPHSKASRRQT

SEQ ID NO: 1083 - protein, 18 aa, synthetic construct
KTINGSGSPHSKRSMQQT

SEQ ID NO: 1084 - protein, 18 aa, synthetic construct
KTINGSGSPHSCLQNQQT

SEQ ID NO: 1085 - protein, 18 aa, synthetic construct
KTINGSGSPHSKRLWQQT

SEQ ID NO: 1086 - protein, 18 aa, synthetic construct
KTINGSGSPHSWLSNQQT

SEQ ID NO: 1087 - protein, 18 aa, synthetic construct
KTINGSGSPHLRRQNQQT

SEQ ID NO: 1088 - protein, 18 aa, synthetic construct
KTINGSGSPHSKARRSQT

SEQ ID NO: 1089 - protein, 18 aa, synthetic construct
KTINGSGSPHSKHLRQQT

SEQ ID NO: 1090 - protein, 18 aa, synthetic construct
KTINGSGSPHSCSQNQQT

SEQ ID NO: 1091 - protein, 18 aa, synthetic construct
KTINGSGSPHSKSFRQQT

SEQ ID NO: 1092 - protein, 18 aa, synthetic construct
KTINGSGSPHLCLQNQQT

SEQ ID NO: 1093 - protein, 18 aa, synthetic construct
KTINGSGSPHSKAQTSRT

SEQ ID NO: 1094 - protein, 18 aa, synthetic construct
KTINGSGSPHSLCSNQQT

SEQ ID NO: 1095 - protein, 18 aa, synthetic construct
KTINGSRSPHLRAQNQQT

SEQ ID NO: 1096 - protein, 18 aa, synthetic construct
KTINGSGSPHSKAQVSKT

SEQ ID NO: 1097 - protein, 18 aa, synthetic construct
KTINGSGSPHSKAQRHVT

SEQ ID NO: 1098 - protein, 18 aa, synthetic construct
KTINGSSSPHLCAQNQQT

SEQ ID NO: 1099 - protein, 18 aa, synthetic construct
KTINGSGSPHSFLRNQQT

SEQ ID NO: 1100 - protein, 18 aa, synthetic construct
KTINGSGSPHSFVLNQQT

SEQ ID NO: 1101 - protein, 18 aa, synthetic construct
KTINGSGSPHSKMRAQQT

SEQ ID NO: 1102 - protein, 18 aa, synthetic construct
KTINGSGSPHRPRQNQQT

SEQ ID NO: 1103 - protein, 18 aa, synthetic construct
KTINGSGSPHSKCLLQQT

SEQ ID NO: 1104 - protein, 18 aa, synthetic construct
KTINGSGSPHSKAQSRRT

SEQ ID NO: 1105 - protein, 18 aa, synthetic construct
KTINGSGSPHSRWQNQQT

SEQ ID NO: 1106 - protein, 18 aa, synthetic construct
KYSVGSGSPHSKAQNQQT

SEQ ID NO: 1107 - protein, 18 aa, synthetic construct
KTINGSGSPHSKRFLQQT

SEQ ID NO: 1108 - protein, 18 aa, synthetic construct
KTINGSGSPHSLFLNQQT

SEQ ID NO: 1109 - protein, 18 aa, synthetic construct
KTINGSGSPHSKAYLRQT

SEQ ID NO: 1110 - protein, 18 aa, synthetic construct
KTINGSGSPHSKRNGQQT

SEQ ID NO: 1111 - protein, 18 aa, synthetic construct
KTINGSGSPHTRRQNQQT

SEQ ID NO: 1112 - protein, 18 aa, synthetic construct
KTINGSGSPHSKPRLQQT

SEQ ID NO: 1113 - protein, 18 aa, synthetic construct
KTINFLRSPHSKAQNQQT

SEQ ID NO: 1114 - protein, 18 aa, synthetic construct
KTINGSGSPHLLCQNQQT

SEQ ID NO: 1115 - protein, 18 aa, synthetic construct
KTINGSGSPHSKARIVQT

SEQ ID NO: 1116 - protein, 18 aa, synthetic construct
KTINGSKSPHFKAQNQQT

SEQ ID NO: 1117 - protein, 18 aa, synthetic construct
KTINGSGSPHSKAQIRLT

SEQ ID NO: 1118 - protein, 18 aa, synthetic construct
KTINGSSSPHWVAQNQQT

SEQ ID NO: 1119 - protein, 18 aa, synthetic construct
KTINGSGSPHSKATRRQT

SEQ ID NO: 1120 - protein, 18 aa, synthetic construct
KTINGSLSPHSCAQNQQT

SEQ ID NO: 1121 - protein, 18 aa, synthetic construct
KTINGSGSPHSLYLNQQT

SEQ ID NO: 1122 - protein, 18 aa, synthetic construct
KTINGSGSPHSKVGRQQT

SEQ ID NO: 1123 - protein, 18 aa, synthetic construct
KTINGSGSPHSRRLNQQT

SEQ ID NO: 1124 - protein, 18 aa, synthetic construct
KTINGSGSPHSKAQHSRT

SEQ ID NO: 1125 - protein, 18 aa, synthetic construct
KTINGSGSPHSKAFPRQT

SEQ ID NO: 1126 - protein, 18 aa, synthetic construct
KTINGSPSPHRRAQNQQT

SEQ ID NO: 1127 - protein, 18 aa, synthetic construct
KTINGSGSPHSKRNLQQT

SEQ ID NO: 1128 - protein, 18 aa, synthetic construct
KTINGSGSPHSKPTRQQT

SEQ ID NO: 1129 - protein, 18 aa, synthetic construct
KTINGSGSPHSKLWLQQT

SEQ ID NO: 1130 - protein, 18 aa, synthetic construct
KTINGSGSPHWLAQNQQT

SEQ ID NO: 1131 - protein, 18 aa, synthetic construct
KTINGSGSPHRTRQNQQT

SEQ ID NO: 1132 - protein, 18 aa, synthetic construct
KTINGSGSPHSKLNKQQT

SEQ ID NO: 1133 - protein, 18 aa, synthetic construct
KTINGSGSPHSSLWNQQT

SEQ ID NO: 1134 - protein, 18 aa, synthetic construct
KTINGSGSPHSKAQITLT

SEQ ID NO: 1135 - protein, 18 aa, synthetic construct
KTINGSGSPHSKFLFQQT

SEQ ID NO: 1136 - protein, 18 aa, synthetic construct
KTINGSGSPHSKRTPQQT

SEQ ID NO: 1137 - protein, 18 aa, synthetic construct
KTINGSGSPHSKAQNSRR

SEQ ID NO: 1138 - protein, 18 aa, synthetic construct
KTINGSGSPHSRLKNQQT

SEQ ID NO: 1139 - protein, 18 aa, synthetic construct
KTINGSGSPHSCLLNQQT

SEQ ID NO: 1140 - protein, 18 aa, synthetic construct
KTINGSGSPHTLYQNQQT

SEQ ID NO: 1141 - protein, 18 aa, synthetic construct
KTINGSGSPHSKYPSQQT

SEQ ID NO: 1142 - protein, 18 aa, synthetic construct
KTINGSGSPHSKLRNQQT

SEQ ID NO: 1143 - protein, 18 aa, synthetic construct
KTINGSGSPHLNWQNQQT

SEQ ID NO: 1144 - protein, 18 aa, synthetic construct
KTINGVVSPHRKAQNQQT

SEQ ID NO: 1145 - protein, 18 aa, synthetic construct
KTINGSGSPHSYRPNQQT

SEQ ID NO: 1146 - protein, 18 aa, synthetic construct
KTINGSTSPHRRAQNQQT

SEQ ID NO: 1147 - protein, 18 aa, synthetic construct
KTINGSCSPHPLAQNQQT

SEQ ID NO: 1148 - protein, 18 aa, synthetic construct
KTINGSGSPHSKAFARQT

SEQ ID NO: 1149 - protein, 18 aa, synthetic construct
KTINGSGSPHSKALRYQT

SEQ ID NO: 1150 - protein, 18 aa, synthetic construct
KTINGSKSPHRLAQNQQT

SEQ ID NO: 1151 - protein, 18 aa, synthetic construct
KTINMRVSPHSKAQNQQT

SEQ ID NO: 1152 - protein, 18 aa, synthetic construct
KTINGSGSPHMYLQNQQT

SEQ ID NO: 1153 - protein, 18 aa, synthetic construct
KTINGSGSPHSKLARQQT

SEQ ID NO: 1154 - protein, 18 aa, synthetic construct
KTINGSGSPHSKARPYQT

SEQ ID NO: 1155 - protein, 18 aa, synthetic construct
KTINGSGSPHSKRVPQQT

SEQ ID NO: 1156 - protein, 18 aa, synthetic construct
KTINGSGSPHLSWQNQQT

SEQ ID NO: 1157 - protein, 18 aa, synthetic construct
KTINGRSSPHGKAQNQQT

SEQ ID NO: 1158 - protein, 18 aa, synthetic construct
KTINGSGSPHLWTQNQQT

SEQ ID NO: 1159 - protein, 18 aa, synthetic construct
KTINGLLSPHRKAQNQQT

SEQ ID NO: 1160 - protein, 18 aa, synthetic construct
KTINGSGSPHRLRQNQQT

SEQ ID NO: 1161 - protein, 18 aa, synthetic construct
KTINGSCSPHSGAQNQQT

SEQ ID NO: 1162 - protein, 18 aa, synthetic construct
KTINGSGSPHSKAQRRST

SEQ ID NO: 1163 - protein, 18 aa, synthetic construct
KTINGSGSPHSKLCSQQT

SEQ ID NO: 1164 - protein, 18 aa, synthetic construct
KTINGSGSPHSKAQLLKT

SEQ ID NO: 1165 - protein, 18 aa, synthetic construct
KTINGRKSPHSKAQNQQT

SEQ ID NO: 1166 - protein, 18 aa, synthetic construct
KTINGSGSPHLLYQNQQT

SEQ ID NO: 1167 - protein, 18 aa, synthetic construct
KTINGSGSPHSKLLRQQT

SEQ ID NO: 1168 - protein, 18 aa, synthetic construct
KTINGSGSPHSLRHNQQT

SEQ ID NO: 1169 - protein, 18 aa, synthetic construct
KTINGSGSPHSSKRNQQT

SEQ ID NO: 1170 - protein, 18 aa, synthetic construct
KTINGSGSPHSKARSRQT

SEQ ID NO: 1171 - protein, 18 aa, synthetic construct
KTINGRSSPHRKAQNQQT

SEQ ID NO: 1172 - protein, 18 aa, synthetic construct
KTINGSKSPHRTAQNQQT

SEQ ID NO: 1173 - protein, 18 aa, synthetic construct
KTINGMRSPHVKAQNQQT

SEQ ID NO: 1174 - protein, 18 aa, synthetic construct
KTINGSGSPHSKRMSQQT

SEQ ID NO: 1175 - protein, 18 aa, synthetic construct
KTINGSGSPHSKVPKQQT

SEQ ID NO: 1176 - protein, 18 aa, synthetic construct
KTINLIRSPHSKAQNQQT

SEQ ID NO: 1177 - protein, 18 aa, synthetic construct
KTINGSGSPHPFLQNQQT

SEQ ID NO: 1178 - protein, 18 aa, synthetic construct
KTINGSGSPHSKARLWQT

SEQ ID NO: 1179 - protein, 18 aa, synthetic construct
KTINGSGSPHSRTRNQQT

SEQ ID NO: 1180 - protein, 18 aa, synthetic construct
KTINGSGSPHSKRSNQQT

SEQ ID NO: 1181 - protein, 18 aa, synthetic construct
KTINGSLSPHSWAQNQQT

SEQ ID NO: 1182 - protein, 18 aa, synthetic construct
KTINGSRSPHYKAQNQQT

SEQ ID NO: 1183 - protein, 18 aa, synthetic construct
KTINRHSSPHSKAQNQQT

SEQ ID NO: 1184 - protein, 18 aa, synthetic construct
KTINGSGSPHSKRRNQQT

SEQ ID NO: 1185 - protein, 18 aa, synthetic construct
KTINGSGSPHSKAKHLQT

SEQ ID NO: 1186 - protein, 18 aa, synthetic construct
KTINGSGSPHSKRTYQQT

SEQ ID NO: 1187 - protein, 18 aa, synthetic construct
KTINGVLSPHRKAQNQQT

SEQ ID NO: 1188 - protein, 18 aa, synthetic construct
KTINGSGSPHSFITNQQT

SEQ ID NO: 1189 - protein, 18 aa, synthetic construct
KTINGSGSPHSTRLNQQT

SEQ ID NO: 1190 - protein, 18 aa, synthetic construct
KTINGSGSPHSKRTSQQT

SEQ ID NO: 1191 - protein, 18 aa, synthetic construct
KTINGSGSPHSRRSNQQT

SEQ ID NO: 1192 - protein, 18 aa, synthetic construct
KTINGHLSPHRKAQNQQT

SEQ ID NO: 1193 - protein, 18 aa, synthetic construct
KTINGSGSPHSKAQFSRT

SEQ ID NO: 1194 - protein, 18 aa, synthetic construct
KTINGSGSPHSKAQTFRT

SEQ ID NO: 1195 - protein, 18 aa, synthetic construct
KTINGSGSPHSKPLRQQT

SEQ ID NO: 1196 - protein, 18 aa, synthetic construct
KTINGSGSPHSKASCRQT

SEQ ID NO: 1197 - protein, 18 aa, synthetic construct
KTINGSGSPHSKILWQQT

SEQ ID NO: 1198 - protein, 18 aa, synthetic construct
KTINGSGSPHSKALKRQT

SEQ ID NO: 1199 - protein, 18 aa, synthetic construct
KTINGSGSPHSKAHRSQT

SEQ ID NO: 1200 - protein, 18 aa, synthetic construct
KTINGSGSPHSMLYNQQT

SEQ ID NO: 1201 - protein, 18 aa, synthetic construct
KTINGSGSPHSKCTLQQT

SEQ ID NO: 1202 - protein, 18 aa, synthetic construct
KTINGSGSPHSKAQNRMR

SEQ ID NO: 1203 - protein, 18 aa, synthetic construct
KTINGSGSPHSKLVRQQT

SEQ ID NO: 1204 - protein, 18 aa, synthetic construct
KTINGSGSPHSKRILQQT

SEQ ID NO: 1205 - protein, 18 aa, synthetic construct
KTINGSGSPHSKAQWLRT

SEQ ID NO: 1206 - protein, 18 aa, synthetic construct
KTINGSGSPHSLTCNQQT

SEQ ID NO: 1207 - protein, 18 aa, synthetic construct
KTINGIRSPHTKAQNQQT

SEQ ID NO: 1208 - protein, 18 aa, synthetic construct
KTINGSGSPHSKAQRWLT

SEQ ID NO: 1209 - protein, 18 aa, synthetic construct
KTINGSGSPHSKAQLSIT

SEQ ID NO: 1210 - protein, 18 aa, synthetic construct
KTINGSGSPHIYRQNQQT

SEQ ID NO: 1211 - protein, 18 aa, synthetic construct
KTINGSGSPHSLRSNQQT

SEQ ID NO: 1212 - protein, 18 aa, synthetic construct
KTINGSGSPHSKVKPQQT

SEQ ID NO: 1213 - protein, 18 aa, synthetic construct
KTINGSGSPHSKATRHQT

SEQ ID NO: 1214 - protein, 18 aa, synthetic construct
KTINGSLSPHLCAQNQQT

SEQ ID NO: 1215 - protein, 18 aa, synthetic construct
KTINGSGSPHSKACASQT

SEQ ID NO: 1216 - protein, 18 aa, synthetic construct
KWSPGSGSPHSKAQNQQT

SEQ ID NO: 1217 - protein, 18 aa, synthetic construct
KTINGYLSPHRKAQNQQT

SEQ ID NO: 1218 - protein, 18 aa, synthetic construct
KTINGSGSPHSKVIRQQT

SEQ ID NO: 1219 - protein, 18 aa, synthetic construct
KTINGSGSPHFLLQNQQT

SEQ ID NO: 1220 - protein, 18 aa, synthetic construct
KTINGSGSPHSKARSKQT

SEQ ID NO: 1221 - protein, 18 aa, synthetic construct
KTINGVPSPHWKAQNQQT

SEQ ID NO: 1222 - protein, 18 aa, synthetic construct
KTINGSGSPHSKATRNQT

SEQ ID NO: 1223 - protein, 18 aa, synthetic construct
KTINGSGSPHSKACSAQT

SEQ ID NO: 1224 - protein, 18 aa, synthetic construct
KTINGSGSPHSKARYVQT

SEQ ID NO: 1225 - protein, 18 aa, synthetic construct
KTINGSRSPHARAQNQQT

SEQ ID NO: 1226 - protein, 18 aa, synthetic construct
KTINGSGSPHSKAQHLRT

SEQ ID NO: 1227 - protein, 18 aa, synthetic construct
KTINGSGSPHSKAKSRQT

SEQ ID NO: 1228 - protein, 18 aa, synthetic construct
KTINGSGSPHSKIGRQQT

SEQ ID NO: 1229 - protein, 18 aa, synthetic construct
KTINGLASPHRKAQNQQT

SEQ ID NO: 1230 - protein, 18 aa, synthetic construct
KTINGSGSPHSKARTRQT

SEQ ID NO: 1231 - protein, 18 aa, synthetic construct
KTINGSGSPHSKSIRQQT

SEQ ID NO: 1232 - protein, 18 aa, synthetic construct
KTINGSGSPHSKRLYQQT

SEQ ID NO: 1233 - protein, 18 aa, synthetic construct
KTINGLPSPHRKAQNQQT

SEQ ID NO: 1234 - protein, 18 aa, synthetic construct
KTINGSLSPHRRAQNQQT

SEQ ID NO: 1235 - protein, 18 aa, synthetic construct
KTINGKTSPHGKAQNQQT

SEQ ID NO: 1236 - protein, 18 aa, synthetic construct
KTINGSRSPHRLAQNQQT

SEQ ID NO: 1237 - protein, 18 aa, synthetic construct
KTINGSGSPHSLTWNQQT

SEQ ID NO: 1238 - protein, 18 aa, synthetic construct
KTINGSKSPHRKAQNQQT

SEQ ID NO: 1239 - protein, 18 aa, synthetic construct
KTINGSGSPHSKAQLRKT

SEQ ID NO: 1240 - protein, 18 aa, synthetic construct
KTINGSGSPHSKSRHQQT

SEQ ID NO: 1241 - protein, 18 aa, synthetic construct
KTINRRLSPHSKAQNQQT

SEQ ID NO: 1242 - protein, 18 aa, synthetic construct
KTINGSGSPHSRRVNQQT

SEQ ID NO: 1243 - protein, 18 aa, synthetic construct
KTINGSGSPHSHWQNQQT

SEQ ID NO: 1244 - protein, 18 aa, synthetic construct
KTTHCSGSPHSKAQNQQT

SEQ ID NO: 1245 - protein, 18 aa, synthetic construct
KTINGSGSPHSWLQNQQT

SEQ ID NO: 1246 - protein, 18 aa, synthetic construct
KTINGSTSPHYLAQNQQT

SEQ ID NO: 1247 - protein, 18 aa, synthetic construct
KTINGLTSPHRKAQNQQT

SEQ ID NO: 1248 - protein, 18 aa, synthetic construct
KTINGSGSPHSKRLLQQT

SEQ ID NO: 1249 - protein, 18 aa, synthetic construct
KTINGSGSPHSKLCVQQT

SEQ ID NO: 1250 - protein, 18 aa, synthetic construct
KTINGFLSPHRKAQNQQT

SEQ ID NO: 1251 - protein, 18 aa, synthetic construct
KTINGSGSPHSKMRPQQT

SEQ ID NO: 1252 - protein, 18 aa, synthetic construct
KTINGSGSPHSKQTRQQT

SEQ ID NO: 1253 - protein, 18 aa, synthetic construct
KTINGSGSPHSYLINQQT

SEQ ID NO: 1254 - protein, 18 aa, synthetic construct
KTINGSGSPHSKALRSQT

SEQ ID NO: 1255 - protein, 18 aa, synthetic construct
KTINGMLSPHRKAQNQQT

SEQ ID NO: 1256 - protein, 18 aa, synthetic construct
KTINGSGSPHSKCLTQQT

SEQ ID NO: 1257 - protein, 18 aa, synthetic construct
KTINGSGSPHSKAQLTLT

SEQ ID NO: 1258 - protein, 18 aa, synthetic construct
KTINGHSSPHRKAQNQQT

SEQ ID NO: 1259 - protein, 18 aa, synthetic construct
KTINGSGSPHLTWQNQQT

SEQ ID NO: 1260 - protein, 18 aa, synthetic construct
KTINGSGSPHSKAQYCLT

SEQ ID NO: 1261 - protein, 18 aa, synthetic construct
KTINGSGSPHSFLVNQQT

SEQ ID NO: 1262 - protein, 18 aa, synthetic construct
KTINMSRSPHSKAQNQQT

SEQ ID NO: 1263 - protein, 18 aa, synthetic construct
KTINGSGSPHSKAQLHRT

SEQ ID NO: 1264 - protein, 18 aa, synthetic construct
KTINGSGSPHLYMQNQQT

SEQ ID NO: 1265 - protein, 18 aa, synthetic construct
KTINGSRSPHRRAQNQQT

SEQ ID NO: 1266 - protein, 18 aa, synthetic construct
KTINGSGSPHSKAQNRRS

SEQ ID NO: 1267 - protein, 18 aa, synthetic construct
KTINLRFSPHSKAQNQQT

SEQ ID NO: 1268 - protein, 18 aa, synthetic construct
KTINGSGSPHSKAQRLWT

SEQ ID NO: 1269 - protein, 18 aa, synthetic construct
KTINGSGSPHSKGRAQQT

SEQ ID NO: 1270 - protein, 18 aa, synthetic construct
KTINGSGSPHSLSCNQQT

SEQ ID NO: 1271 - protein, 18 aa, synthetic construct
KTINGLVSPHCKAQNQQT

SEQ ID NO: 1272 - protein, 18 aa, synthetic construct
KTINGSSSPHLWAQNQQT

SEQ ID NO: 1273 - protein, 18 aa, synthetic construct
KTINGSGSPHSKAHRLQT

SEQ ID NO: 1274 - protein, 18 aa, synthetic construct
KTINGSGSPHPYAQNQQT

SEQ ID NO: 1275 - protein, 18 aa, synthetic construct
KTINGSGSPHSTRPNQQT

SEQ ID NO: 1276 - protein, 18 aa, synthetic construct
KTINGRSSPHPKAQNQQT

SEQ ID NO: 1277 - protein, 18 aa, synthetic construct
KTINGSGSPHSKAQSWRT

SEQ ID NO: 1278 - protein, 18 aa, synthetic construct
KTINGQRSPHVKAQNQQT

SEQ ID NO: 1279 - protein, 18 aa, synthetic construct
KTINGSGSPHSKAQFVRT

SEQ ID NO: 1280 - protein, 18 aa, synthetic construct
KTINGSGSPHSKCLNQQT

SEQ ID NO: 1281 - protein, 18 aa, synthetic construct
KTINGSGSPHSSLCNQQT

SEQ ID NO: 1282 - protein, 18 aa, synthetic construct
KTINGQRSPHSKAQNQQT

SEQ ID NO: 1283 - protein, 18 aa, synthetic construct
KTINGSGSPHSLSWNQQT

SEQ ID NO: 1284 - protein, 18 aa, synthetic construct
KTINGSGSPHSSRKNQQT

SEQ ID NO: 1285 - protein, 18 aa, synthetic construct
KTINGSGSPHSKRTLQQT

SEQ ID NO: 1286 - protein, 18 aa, synthetic construct
KTINGSLSPHCLAQNQQT

SEQ ID NO: 1287 - protein, 18 aa, synthetic construct
KTINGSGSPHSKAQSSRT

SEQ ID NO: 1288 - protein, 18 aa, synthetic construct
KTINGSGSPHLKRQNQQT

SEQ ID NO: 1289 - protein, 18 aa, synthetic construct
KTINGSGSPHSKARMGQT

SEQ ID NO: 1290 - protein, 18 aa, synthetic construct
KTINGSGSPHSKAQVKLT

SEQ ID NO: 1291 - protein, 18 aa, synthetic construct
KTINGSGSPHSKLPRQQT

SEQ ID NO: 1292 - protein, 18 aa, synthetic construct
KTINGSGSPHSKLCLQQT

SEQ ID NO: 1293 - protein, 18 aa, synthetic construct
KTINGSGSPHSPLWNQQT

SEQ ID NO: 1294 - protein, 18 aa, synthetic construct
KTINGSVSPHSWAQNQQT

SEQ ID NO: 1295 - protein, 18 aa, synthetic construct
KTIRSKGSPHSKAQNQQT

SEQ ID NO: 1296 - protein, 18 aa, synthetic construct
KTINGSRSPHSWAQNQQT

SEQ ID NO: 1297 - protein, 18 aa, synthetic construct
KTINGSGSPHSKILRQQT

SEQ ID NO: 1298 - protein, 18 aa, synthetic construct
KTINGRQSPHVKAQNQQT

SEQ ID NO: 1299 - protein, 18 aa, synthetic construct
KTINGSGSPHSKAQSIKT

SEQ ID NO: 1300 - protein, 18 aa, synthetic construct
KTINGSGSPHSKAQASKT

SEQ ID NO: 1301 - protein, 18 aa, synthetic construct
KTINGSGSPHSRLFNQQT

SEQ ID NO: 1302 - protein, 18 aa, synthetic construct
KTINGSGSPHIYLQNQQT

SEQ ID NO: 1303 - protein, 18 aa, synthetic construct
KTINGSGSPHSRVRNQQT

SEQ ID NO: 1304 - protein, 18 aa, synthetic construct
KTINGSGSPHSKAVRAQT

SEQ ID NO: 1305 - protein, 18 aa, synthetic construct
KTINGSGSPHSKPARQQT

SEQ ID NO: 1306 - protein, 18 aa, synthetic construct
KTINGSGSPHSRYSNQQT

SEQ ID NO: 1307 - protein, 18 aa, synthetic construct
KTINGSRSPHRSAQNQQT

SEQ ID NO: 1308 - protein, 18 aa, synthetic construct
KTINGSLSPHIYAQNQQT

SEQ ID NO: 1309 - protein, 18 aa, synthetic construct
KTINGSGSPHSKPVRQQT

SEQ ID NO: 1310 - protein, 18 aa, synthetic construct
KTINGMRSPHGKAQNQQT

SEQ ID NO: 1311 - protein, 18 aa, synthetic construct
KTINGSGSPHSKARITQT

SEQ ID NO: 1312 - protein, 18 aa, synthetic construct
KTINGSGSPHSWSLNQQT

SEQ ID NO: 1313 - protein, 18 aa, synthetic construct
KTINTSRSPHSKAQNQQT

SEQ ID NO: 1314 - protein, 18 aa, synthetic construct
KTINGSGSPHSKAFTRQT

SEQ ID NO: 1315 - protein, 18 aa, synthetic construct
KTINGSGSPHSKAVRNQT

SEQ ID NO: 1316 - protein, 18 aa, synthetic construct
KTINGSGSPHSKAQTNRT

SEQ ID NO: 1317 - protein, 18 aa, synthetic construct
KTINGSGSPHSKANRMQT

SEQ ID NO: 1318 - protein, 18 aa, synthetic construct
KTINGSGSPHSKAQLVLT

SEQ ID NO: 1319 - protein, 18 aa, synthetic construct
KTINGSGSPHSKATRQQT

SEQ ID NO: 1320 - protein, 18 aa, synthetic construct
KTINGSGSPHSKARGTQT

SEQ ID NO: 1321 - protein, 18 aa, synthetic construct
KTINGSGSPHSKAQWSVT

SEQ ID NO: 1322 - protein, 18 aa, synthetic construct
KTINGSGSPHSKAWLIQT

SEQ ID NO: 1323 - protein, 18 aa, synthetic construct
KTINGSGSPHSKAFRPQT

SEQ ID NO: 1324 - protein, 18 aa, synthetic construct
KTINGSGSPHRRSQNQQT

SEQ ID NO: 1325 - protein, 18 aa, synthetic construct
KTINGSGSPHSKGIRQQT

SEQ ID NO: 1326 - protein, 18 aa, synthetic construct
KTINGSGSPHCTLQNQQT

SEQ ID NO: 1327 - protein, 18 aa, synthetic construct
KPLPGSGSPHSKAQNQQT

SEQ ID NO: 1328 - protein, 18 aa, synthetic construct
KTINGSGSPHLVCQNQQT

SEQ ID NO: 1329 - protein, 18 aa, synthetic construct
KTINGSGSPHSKARGYQT

SEQ ID NO: 1330 - protein, 18 aa, synthetic construct
KTINGRISPHGKAQNQQT

SEQ ID NO: 1331 - protein, 18 aa, synthetic construct
KTINGSSSPHWLAQNQQT

SEQ ID NO: 1332 - protein, 18 aa, synthetic construct
KTINGSGSPHSKARMAQT

SEQ ID NO: 1333 - protein, 18 aa, synthetic construct
KPLDGSGSPHSKAQNQQT

SEQ ID NO: 1334 - protein, 18 aa, synthetic construct
KPLRGSGSPHSKAQNQQT

SEQ ID NO: 1335 - protein, 18 aa, synthetic construct
KTINGSGSPHSKAQNAKL

SEQ ID NO: 1336 - protein, 18 aa, synthetic construct
KTINGSGSPHSKLSKQQT

SEQ ID NO: 1337 - protein, 18 aa, synthetic construct
KTINGSGSPHSKARNGQT

SEQ ID NO: 1338 - protein, 18 aa, synthetic construct
KTINGSGSPHSKAQRRQT

SEQ ID NO: 1339 - protein, 18 aa, synthetic construct
KTINGSGSPHSKWPGQQT

SEQ ID NO: 1340 - protein, 18 aa, synthetic construct
KTINGSGSPHAFLQNQQT

SEQ ID NO: 1341 - protein, 18 aa, synthetic construct
KTINGILSPHRKAQNQQT

SEQ ID NO: 1342 - protein, 18 aa, synthetic construct
KTINGSGSPHSWGSNQQT

SEQ ID NO: 1343 - protein, 18 aa, synthetic construct
KTINGSGSPHSSCLNQQT

SEQ ID NO: 1344 - protein, 18 aa, synthetic construct
KTINGSGSPHSKAQSVKT

SEQ ID NO: 1345 - protein, 18 aa, synthetic construct
KTINGSGSPHSLRYNQQT

SEQ ID NO: 1346 - protein, 18 aa, synthetic construct
KTINGSGSPHSKARKLQT

SEQ ID NO: 1347 - protein, 18 aa, synthetic construct
KHRSGSGSPHSKAQNQQT

SEQ ID NO: 1348 - protein, 18 aa, synthetic construct
KTINGSGSPHSKWSLQQT

SEQ ID NO: 1349 - protein, 18 aa, synthetic construct
KTINGSGSPHSKAQTMRT

SEQ ID NO: 1350 - protein, 18 aa, synthetic construct
KTINGSGSPHSKTIRQQT

SEQ ID NO: 1351 - protein, 18 aa, synthetic construct
KTINGKLSPHMKAQNQQT

SEQ ID NO: 1352 - protein, 18 aa, synthetic construct
KTINGSGSPHSKARPFQT

SEQ ID NO: 1353 - protein, 18 aa, synthetic construct
KTINGSGSPHSKPRVQQT

SEQ ID NO: 1354 - protein, 18 aa, synthetic construct
KTINGSGSPHSKAQVVLT

SEQ ID NO: 1355 - protein, 18 aa, synthetic construct
KTRRSSGSPHSKAQNQQT

SEQ ID NO: 1356 - protein, 18 aa, synthetic construct
KTINGSGSPHSKPSRQQT

SEQ ID NO: 1357 - protein, 18 aa, synthetic construct
KTINGSGSPHSVYRNQQT

SEQ ID NO: 1358 - protein, 18 aa, synthetic construct
KTINGSGSPHSKTCSQQT

SEQ ID NO: 1359 - protein, 18 aa, synthetic construct
KTINGSPSPHRKAQNQQT

SEQ ID NO: 1360 - protein, 18 aa, synthetic construct
KTINGRSSPHFKAQNQQT

SEQ ID NO: 1361 - protein, 18 aa, synthetic construct
KTINGSGSPHSKAQMVRT

SEQ ID NO: 1362 - protein, 18 aa, synthetic construct
KTINGSRSPHCSAQNQQT

SEQ ID NO: 1363 - protein, 18 aa, synthetic construct
KTINGSCSPHLRAQNQQT

SEQ ID NO: 1364 - protein, 18 aa, synthetic construct
KTINGSGSPHSKAQCLFT

SEQ ID NO: 1365 - protein, 18 aa, synthetic construct
KTINGRPSPHVKAQNQQT

SEQ ID NO: 1366 - protein, 18 aa, synthetic construct
KTINGSGSPHSMFPNQQT

SEQ ID NO: 1367 - protein, 18 aa, synthetic construct
KTINGMKSPHSKAQNQQT

SEQ ID NO: 1368 - protein, 18 aa, synthetic construct
KTINGSGSPHSKVRAQQT

SEQ ID NO: 1369 - protein, 18 aa, synthetic construct
KGLVGSGSPHSKAQNQQT

SEQ ID NO: 1370 - protein, 18 aa, synthetic construct
KTINGSRSPHVRAQNQQT

SEQ ID NO: 1371 - protein, 18 aa, synthetic construct
KTIRLRGSPHSKAQNQQT

SEQ ID NO: 1372 - protein, 18 aa, synthetic construct
KPRLGSGSPHSKAQNQQT

SEQ ID NO: 1373 - protein, 18 aa, synthetic construct
KTINGSGSPHSKAWYPQT

SEQ ID NO: 1374 - protein, 18 aa, synthetic construct
KTINGSCSPHVRAQNQQT

SEQ ID NO: 1375 - protein, 18 aa, synthetic construct
KTINGSGSPHSKRNVQQT

SEQ ID NO: 1376 - protein, 18 aa, synthetic construct
KTINGSGSPHSKRGLQQT

SEQ ID NO: 1377 - protein, 18 aa, synthetic construct
KTINGSGSPHSKRLAQQT

SEQ ID NO: 1378 - protein, 18 aa, synthetic construct
KTINGSGSPHSKVTRQQT

SEQ ID NO: 1379 - protein, 18 aa, synthetic construct
KTINGSGSPHTWLQNQQT

SEQ ID NO: 1380 - protein, 18 aa, synthetic construct
KTINGSGSPHSKQRSQQT

SEQ ID NO: 1381 - protein, 18 aa, synthetic construct
KTINGSGSPHSKAQRCST

SEQ ID NO: 1382 - protein, 18 aa, synthetic construct
KTINGSPSPHYLAQNQQT

SEQ ID NO: 1383 - protein, 18 aa, synthetic construct
KTINGRRSPHLKAQNQQT

SEQ ID NO: 1384 - protein, 18 aa, synthetic construct
KTINGSGSPHWSLQNQQT

SEQ ID NO: 1385 - protein, 18 aa, synthetic construct
KTINGVTSPHWKAQNQQT

SEQ ID NO: 1386 - protein, 18 aa, synthetic construct
KTINGSGSPHSKAQTTRT

SEQ ID NO: 1387 - protein, 18 aa, synthetic construct
KTINGSGSPHSKAQLFKT

SEQ ID NO: 1388 - protein, 18 aa, synthetic construct
KTINGSGSPHSKARSYQT

SEQ ID NO: 1389 - protein, 18 aa, synthetic construct
KTINGSGSPHSKLSRQQT

SEQ ID NO: 1390 - protein, 18 aa, synthetic construct
KTINGSGSPHLVFQNQQT

SEQ ID NO: 1391 - protein, 18 aa, synthetic construct
KTINGSGSPHSKAQLVKT

SEQ ID NO: 1392 - protein, 18 aa, synthetic construct
KTINGSGSPHSKAQTGRT

SEQ ID NO: 1393 - protein, 18 aa, synthetic construct
KTINGSGSPHSKARYSQT

SEQ ID NO: 1394 - protein, 18 aa, synthetic construct
KTINGRHSPHLKAQNQQT

SEQ ID NO: 1395 - protein, 18 aa, synthetic construct
KTINGSGSPHSFARNQQT

SEQ ID NO: 1396 - protein, 18 aa, synthetic construct
KTINGSGSPHSSCQNQQT

SEQ ID NO: 1397 - protein, 18 aa, synthetic construct
KTINGSGSPHSLFANQQT

SEQ ID NO: 1398 - protein, 18 aa, synthetic construct
KTINGSGSPHSKRLTQQT

SEQ ID NO: 1399 - protein, 18 aa, synthetic construct
KTINGSGSPHSKAQTART

SEQ ID NO: 1400 - protein, 18 aa, synthetic construct
KTINGSGSPHFLNQNQQT

SEQ ID NO: 1401 - protein, 18 aa, synthetic construct
KTINGSGSPHSKAQLILT

SEQ ID NO: 1402 - protein, 18 aa, synthetic construct
KEVGGSGSPHSKAQNQQT

SEQ ID NO: 1403 - protein, 18 aa, synthetic construct
KTINGSRSPHIRAQNQQT

SEQ ID NO: 1404 - protein, 18 aa, synthetic construct
KTINGSGSPHSSWLNQQT

SEQ ID NO: 1405 - protein, 18 aa, synthetic construct
KTINGSMSPHLYAQNQQT

SEQ ID NO: 1406 - protein, 18 aa, synthetic construct
KTINGMSSPHRKAQNQQT

SEQ ID NO: 1407 - protein, 18 aa, synthetic construct
KTINGSGSPHSKPRPQQT

SEQ ID NO: 1408 - protein, 18 aa, synthetic construct
KTINGSGSPHSGLWNQQT

SEQ ID NO: 1409 - protein, 18 aa, synthetic construct
KTINGSGSPHRWAQNQQT

SEQ ID NO: 1410 - protein, 18 aa, synthetic construct
KTINGSGSPHSKIRLQQT

SEQ ID NO: 1411 - protein, 18 aa, synthetic construct
KTINGSGSPHSKFSCQQT

SEQ ID NO: 1412 - protein, 18 aa, synthetic construct
KTINGSGSPHSKSCAQQT

SEQ ID NO: 1413 - protein, 18 aa, synthetic construct
KTINGSGSPHSKRLMQQT

SEQ ID NO: 1414 - protein, 18 aa, synthetic construct
KTSRCSGSPHSKAQNQQT

SEQ ID NO: 1415 - protein, 18 aa, synthetic construct
KTINGSGSPHSFLLNQQT

SEQ ID NO: 1416 - protein, 18 aa, synthetic construct
KTINGSGSPHCSAQNQQT

SEQ ID NO: 1417 - protein, 18 aa, synthetic construct
KTINGSGSPHSKAQPSKT

SEQ ID NO: 1418 - protein, 18 aa, synthetic construct
KTINGSGSPHSYVRNQQT

SEQ ID NO: 1419 - protein, 18 aa, synthetic construct
KTINGSGSPHSKAQQSRT

SEQ ID NO: 1420 - protein, 18 aa, synthetic construct
KTINGSGSPHSFVVNQQT

SEQ ID NO: 1421 - protein, 18 aa, synthetic construct
KTINGFRSPHSKAQNQQT

SEQ ID NO: 1422 - protein, 18 aa, synthetic construct
KTINGSGSPHSKWLVQQT

SEQ ID NO: 1423 - protein, 18 aa, synthetic construct
KTINGSGSPHSKRTAQQT

SEQ ID NO: 1424 - protein, 18 aa, synthetic construct
KTINGLFSPHRKAQNQQT

SEQ ID NO: 1425 - protein, 18 aa, synthetic construct
KTINTIESPHSKAQNQQT

SEQ ID NO: 1426 - protein, 18 aa, synthetic construct
KRLFGSGSPHSKAQNQQT

SEQ ID NO: 1427 - protein, 18 aa, synthetic construct
KTINGSGSPHSKAPNHLT

SEQ ID NO: 1428 - protein, 18 aa, synthetic construct
KTINGSGSPHLFRQNQQT

SEQ ID NO: 1429 - protein, 18 aa, synthetic construct
KTINGSGSPHSKASRHQT

SEQ ID NO: 1430 - protein, 18 aa, synthetic construct
KTINGSGSPHSKLSWQQT

SEQ ID NO: 1431 - protein, 18 aa, synthetic construct
KETAGSGSPHSKAQNQQT

SEQ ID NO: 1432 - protein, 18 aa, synthetic construct
KTINGHRSPHLKAQNQQT

SEQ ID NO: 1433 - protein, 18 aa, synthetic construct
KTINGSGSPHSKGCLQQT

SEQ ID NO: 1434 - protein, 18 aa, synthetic construct
KTINGSGSPHSKAQVLIT

SEQ ID NO: 1435 - protein, 18 aa, synthetic construct
KTINGSGSPHSKLRSQQT

SEQ ID NO: 1436 - protein, 18 aa, synthetic construct
KTINGTLSPHRKAQNQQT

SEQ ID NO: 1437 - protein, 18 aa, synthetic construct
KTINGSGSPHSTWTNQQT

SEQ ID NO: 1438 - protein, 18 aa, synthetic construct
KTINGSGSPHSKAQCRLT

SEQ ID NO: 1439 - protein, 18 aa, synthetic construct
KTINNLRSPHSKAQNQQT

SEQ ID NO: 1440 - protein, 18 aa, synthetic construct
KTINGSGSPHSKARANQT

SEQ ID NO: 1441 - protein, 18 aa, synthetic construct
KTINGRQSPHTKAQNQQT

SEQ ID NO: 1442 - protein, 18 aa, synthetic construct
KTINSARSPHSKAQNQQT

SEQ ID NO: 1443 - protein, 18 aa, synthetic construct
KTINGCSSPHRKAQNQQT

SEQ ID NO: 1444 - protein, 18 aa, synthetic construct
KTINGSVSPHFMAQNQQT

SEQ ID NO: 1445 - protein, 18 aa, synthetic construct
KTINGSGSPHSLCQNQQT

SEQ ID NO: 1446 - protein, 18 aa, synthetic construct
KTINGSLSPHLFAQNQQT

SEQ ID NO: 1447 - protein, 18 aa, synthetic construct
KTINGSGSPHSKACPLQT

SEQ ID NO: 1448 - protein, 18 aa, synthetic construct
KTINGRTSPHRKAQNQQT

SEQ ID NO: 1449 - protein, 18 aa, synthetic construct
KTINGSGSPHSKRATQQT

SEQ ID NO: 1450 - protein, 18 aa, synthetic construct
KTINGSGSPHSKARIMQT

SEQ ID NO: 1451 - protein, 18 aa, synthetic construct
KTINGSGSPHVTWQNQQT

SEQ ID NO: 1452 - protein, 18 aa, synthetic construct
KTINGSGSPHSKRLPQQT

SEQ ID NO: 1453 - protein, 18 aa, synthetic construct
KTINGSGSPHSKAQGFRT

SEQ ID NO: 1454 - protein, 18 aa, synthetic construct
KTINGSGSPHLYGQNQQT

SEQ ID NO: 1455 - protein, 18 aa, synthetic construct
KTINGSGSPHLSCQNQQT

SEQ ID NO: 1456 - protein, 18 aa, synthetic construct
KTINGSGSPHSKAQFTLT

SEQ ID NO: 1457 - protein, 18 aa, synthetic construct
KTINGSRSPHFKAQNQQT

SEQ ID NO: 1458 - protein, 18 aa, synthetic construct
KTINGRPSPHSKAQNQQT

SEQ ID NO: 1459 - protein, 18 aa, synthetic construct
KTINGFSSPHRKAQNQQT

SEQ ID NO: 1460 - protein, 18 aa, synthetic construct
KTINGRASPHVKAQNQQT

SEQ ID NO: 1461 - protein, 18 aa, synthetic construct
KTINGSGSPHSKAQNEVH

SEQ ID NO: 1462 - protein, 18 aa, synthetic construct
KTINGSGSPHSKRSLQQT

SEQ ID NO: 1463 - protein, 18 aa, synthetic construct
KTINGSGSPHRSRQNQQT

SEQ ID NO: 1464 - protein, 18 aa, synthetic construct
KPPTGSGSPHSKAQNQQT

SEQ ID NO: 1465 - protein, 18 aa, synthetic construct
KTINGSGSPHSKAARTQT

SEQ ID NO: 1466 - protein, 18 aa, synthetic construct
KTINGSGSPHSSWANQQT

SEQ ID NO: 1467 - protein, 18 aa, synthetic construct
KTINGSGSPHSKAQRHAT

SEQ ID NO: 1468 - protein, 18 aa, synthetic construct
KTINSPRSPHSKAQNQQT

SEQ ID NO: 1469 - protein, 18 aa, synthetic construct
KTINGSGSPHSKSERQQT

SEQ ID NO: 1470 - protein, 18 aa, synthetic construct
KTINGSGSPHALFQNQQT

SEQ ID NO: 1471 - protein, 18 aa, synthetic construct
KTINGSGSPHSKAQCYVT

SEQ ID NO: 1472 - protein, 18 aa, synthetic construct
KTINGVASPHRKAQNQQT

SEQ ID NO: 1473 - protein, 18 aa, synthetic construct
KTINGSGSPHSALWNQQT

SEQ ID NO: 1474 - protein, 18 aa, synthetic construct
KTINGSGSPHSKSVRQQT

SEQ ID NO: 1475 - protein, 18 aa, synthetic construct
KTINGSGSPHSHMENQQT

SEQ ID NO: 1476 - protein, 18 aa, synthetic construct
KTINGSGTPHSKAQNQQT

SEQ ID NO: 1477 - protein, 18 aa, synthetic construct
KTINGSGSPHSKTGRQQT

SEQ ID NO: 1478 - protein, 18 aa, synthetic construct
KTINGSGSPHSKAQANRT

SEQ ID NO: 1479 - protein, 18 aa, synthetic construct
KTINGSGSPHSKARFSQT

SEQ ID NO: 1480 - protein, 18 aa, synthetic construct
KYLLGSGSPHSKAQNQQT

SEQ ID NO: 1481 - protein, 18 aa, synthetic construct
KTINGSGSPHCSSQNQQT

SEQ ID NO: 1482 - protein, 18 aa, synthetic construct
KTINGSMSPHRKAQNQQT

SEQ ID NO: 1483 - protein, 18 aa, synthetic construct
KTINGNLSPHRKAQNQQT

SEQ ID NO: 1484 - protein, 18 aa, synthetic construct
KEVAGSGSPHSKAQNQQT

SEQ ID NO: 1485 - protein, 18 aa, synthetic construct
KTINLSRSPHSKAQNQQT

SEQ ID NO: 1486 - protein, 18 aa, synthetic construct
KTINGSGSPHSKARQQQT

SEQ ID NO: 1487 - protein, 18 aa, synthetic construct
KTINGTPSPHRKAQNQQT

SEQ ID NO: 1488 - protein, 18 aa, synthetic construct
KTINGSGSPHSKFKLQQT

SEQ ID NO: 1489 - protein, 18 aa, synthetic construct
KTINGSGSPHSKAWLLQT

SEQ ID NO: 1490 - protein, 18 aa, synthetic construct
KTINGLRSPHSKAQNQQT

SEQ ID NO: 1491 - protein, 18 aa, synthetic construct
KTINGRLSPHRKAQNQQT

SEQ ID NO: 1492 - protein, 18 aa, synthetic construct
KTINGSPSPHLFAQNQQT

SEQ ID NO: 1493 - protein, 18 aa, synthetic construct
KDLRGSGSPHSKAQNQQT

SEQ ID NO: 1494 - protein, 18 aa, synthetic construct
KTINGSGSPHSKAQLAKT

SEQ ID NO: 1495 - protein, 18 aa, synthetic construct
KTINGSGSPHSKPRSQQT

SEQ ID NO: 1496 - protein, 18 aa, synthetic construct
KTINGSGSPHSKKMSQQT

SEQ ID NO: 1497 - protein, 18 aa, synthetic construct
KTINGSGSPHSKAQLIVT

SEQ ID NO: 1498 - protein, 18 aa, synthetic construct
KTINGSGSPHSKARFTQT

SEQ ID NO: 1499 - protein, 18 aa, synthetic construct
KTINGSGSPHPLFQNQQT

SEQ ID NO: 1500 - protein, 18 aa, synthetic construct
KTINGSGSPHSKAQRGMT

SEQ ID NO: 1501 - protein, 18 aa, synthetic construct
KTINGSGSPHSKAQNLRR

SEQ ID NO: 1502 - protein, 18 aa, synthetic construct
KTINGSGSPHSKAQFRVT

SEQ ID NO: 1503 - protein, 18 aa, synthetic construct
KTINGSGSPHSKAFVRQT

SEQ ID NO: 1504 - protein, 18 aa, synthetic construct
KTINGSGSPHSKARLTQT

SEQ ID NO: 1505 - protein, 18 aa, synthetic construct
KTINGSGSPHRFKQNQQT

SEQ ID NO: 1506 - protein, 18 aa, synthetic construct
KTINGSGSPHSKEETQQT

SEQ ID NO: 1507 - protein, 18 aa, synthetic construct
KTINGSGSPHSKTRAQQT

SEQ ID NO: 1508 - protein, 18 aa, synthetic construct
KTINGSGSPHSVSWNQQT

SEQ ID NO: 1509 - protein, 18 aa, synthetic construct
KTINGSGSPHTKWQNQQT

SEQ ID NO: 1510 - protein, 18 aa, synthetic construct
KTINGSNSPHRKAQNQQT

SEQ ID NO: 1511 - protein, 18 aa, synthetic construct
KTINGSGSPHSKAQNKRS

SEQ ID NO: 1512 - protein, 18 aa, synthetic construct
KTINGSGSPHSTRQNQQT

SEQ ID NO: 1513 - protein, 18 aa, synthetic construct
KTINGTRSPHTKAQNQQT

SEQ ID NO: 1514 - protein, 18 aa, synthetic construct
KTINGSGSPHVLFQNQQT

SEQ ID NO: 1515 - protein, 18 aa, synthetic construct
KTINGSVSPHYLAQNQQT

SEQ ID NO: 1516 - protein, 18 aa, synthetic construct
KTINGALSPHRKAQNQQT

SEQ ID NO: 1517 - protein, 18 aa, synthetic construct
KTINGSGSPHSKARLYQT

SEQ ID NO: 1518 - protein, 18 aa, synthetic construct
KTINGSGSPHEHNQNQQT

SEQ ID NO: 1519 - protein, 18 aa, synthetic construct
KTINGVLSPHWKAQNQQT

SEQ ID NO: 1520 - protein, 18 aa, synthetic construct
KTINGSGSPHSKASRQQT

SEQ ID NO: 1521 - protein, 18 aa, synthetic construct
KTINGSGSPHSKRSFQQT

SEQ ID NO: 1522 - protein, 18 aa, synthetic construct
KTINGSGSPHSKRVSQQT

SEQ ID NO: 1523 - protein, 18 aa, synthetic construct
KTINGSGSPHSYSRNQQT

SEQ ID NO: 1524 - protein, 18 aa, synthetic construct
KTINGSGSPHSTVWNQQT

SEQ ID NO: 1525 - protein, 18 aa, synthetic construct
KTINGSGSPHSVLFNQQT

SEQ ID NO: 1526 - protein, 18 aa, synthetic construct
KTINGPLSPHCKAQNQQT

SEQ ID NO: 1527 - protein, 18 aa, synthetic construct
KTINGSGSPHSKRVGQQT

SEQ ID NO: 1528 - protein, 18 aa, synthetic construct
KTINGSGSPHSKLWSQQT

SEQ ID NO: 1529 - protein, 18 aa, synthetic construct
KTINGSGSPHSKAQGVRT

SEQ ID NO: 1530 - protein, 18 aa, synthetic construct
KTINGSVSPHRRAQNQQT

SEQ ID NO: 1531 - protein, 18 aa, synthetic construct
KTINGSGSPHLRFQNQQT

SEQ ID NO: 1532 - protein, 18 aa, synthetic construct
KTINGSASPHVFAQNQQT

SEQ ID NO: 1533 - protein, 18 aa, synthetic construct
KTWVRSGSPHSKAQNQQT

SEQ ID NO: 1534 - protein, 18 aa, synthetic construct
KTINGSGSPHSKARMQQT

SEQ ID NO: 1535 - protein, 18 aa, synthetic construct
KTINGSGSPHSKASRGQT

SEQ ID NO: 1536 - protein, 18 aa, synthetic construct
KTINGSGSPHSKAQVCLT

SEQ ID NO: 1537 - protein, 18 aa, synthetic construct
KTINGSGSPHSKARGVQT

SEQ ID NO: 1538 - protein, 18 aa, synthetic construct
KTINGSGSPHGLWQNQQT

SEQ ID NO: 1539 - protein, 18 aa, synthetic construct
KTINGSGSPHSKAQVWFT

SEQ ID NO: 1540 - protein, 18 aa, synthetic construct
KTINGSGSPHSKAQVTLT

SEQ ID NO: 1541 - protein, 18 aa, synthetic construct
KTINGSGSPHSKAQLRIT

SEQ ID NO: 1542 - protein, 18 aa, synthetic construct
KDSLGSGSPHSKAQNQQT

SEQ ID NO: 1543 - protein, 18 aa, synthetic construct
KTINGSGSPHSKRASQQT

SEQ ID NO: 1544 - protein, 18 aa, synthetic construct
KTINGSGSPHSKRINQQT

SEQ ID NO: 1545 - protein, 18 aa, synthetic construct
KTINGSGSPHSKASKNQT

SEQ ID NO: 1546 - protein, 18 aa, synthetic construct
KTINGSGSPHSKAQLPWT

SEQ ID NO: 1547 - protein, 18 aa, synthetic construct
KTINGSGSPHSKLTRQQT

SEQ ID NO: 1548 - protein, 18 aa, synthetic construct
KTINGSGSPHSKTNRQQT

SEQ ID NO: 1549 - protein, 18 aa, synthetic construct
KTINRVISPHSKAQNQQT

SEQ ID NO: 1550 - protein, 18 aa, synthetic construct
KTINGSGSPHTLWQNQQT

SEQ ID NO: 1551 - protein, 18 aa, synthetic construct
KTINGSGSPHSRRQNQQT

SEQ ID NO: 1552 - protein, 18 aa, synthetic construct
KTINGSGSPHSKGGRQQT

SEQ ID NO: 1553 - protein, 18 aa, synthetic construct
KTINGSESPHDSAQNQQT

SEQ ID NO: 1554 - protein, 18 aa, synthetic construct
KTINGSGSPHSRPRNQQT

SEQ ID NO: 1555 - protein, 18 aa, synthetic construct
KTINGSGSPHSRKQNQQT

SEQ ID NO: 1556 - protein, 18 aa, synthetic construct
KTINGSGSPHSKAQEELT

SEQ ID NO: 1557 - protein, 18 aa, synthetic construct
KTINGWRSPHSKAQNQQT

SEQ ID NO: 1558 - protein, 18 aa, synthetic construct
KTINGSGSPHSLLYNQQT

SEQ ID NO: 1559 - protein, 18 aa, synthetic construct
KTINGSGSPHSFRLNQQT

SEQ ID NO: 1560 - protein, 18 aa, synthetic construct
KTINGSGSPHSKAQFLRT

SEQ ID NO: 1561 - protein, 18 aa, synthetic construct
KTINGSGSPHSKQSRQQT

SEQ ID NO: 1562 - protein, 18 aa, synthetic construct
KTINGSRSPHSKAQNRQT

SEQ ID NO: 1563 - protein, 18 aa, synthetic construct
KTINGRPSPHIKAQNQQT

SEQ ID NO: 1564 - protein, 18 aa, synthetic construct
KTINGSGSPHSKRLVQQT

SEQ ID NO: 1565 - protein, 18 aa, synthetic construct
KGHEGSGSPHSKAQNQQT

SEQ ID NO: 1566 - protein, 18 aa, synthetic construct
KTINGSGSPHSKAQKRST

SEQ ID NO: 1567 - protein, 18 aa, synthetic construct
KTINGSGSPHSYLLNQQT

SEQ ID NO: 1568 - protein, 18 aa, synthetic construct
KTINGSGSPHSKPRGQQT

SEQ ID NO: 1569 - protein, 18 aa, synthetic construct
KTINGSGSPHSKTRLQQT

SEQ ID NO: 1570 - protein, 18 aa, synthetic construct
KTINGSGSPHSKSHRQQT

SEQ ID NO: 1571 - protein, 18 aa, synthetic construct
KEIKGSGSPHSKAQNQQT

SEQ ID NO: 1572 - protein, 18 aa, synthetic construct
KTINGSGSPHSKARGIQT

SEQ ID NO: 1573 - protein, 18 aa, synthetic construct
KTINGYRSPHSKAQNQQT

SEQ ID NO: 1574 - protein, 18 aa, synthetic construct
KTINGSGSPHSKLWTQQT

SEQ ID NO: 1575 - protein, 18 aa, synthetic construct
KTINGSGSPHSKPWLQQT

SEQ ID NO: 1576 - protein, 18 aa, synthetic construct
KTINGSGSPHWSVQNQQT

SEQ ID NO: 1577 - protein, 18 aa, synthetic construct
KTINGSGSPHSKVARQQT

SEQ ID NO: 1578 - protein, 18 aa, synthetic construct
KTINGSGSPHTLFQNQQT

SEQ ID NO: 1579 - protein, 18 aa, synthetic construct
KTINGSCSPHLAAQNQQT

SEQ ID NO: 1580 - protein, 18 aa, synthetic construct
KTINGSGSPHSKTSRQQT

SEQ ID NO: 1581 - protein, 18 aa, synthetic construct
KTINGSGSPHSKAQNARH

SEQ ID NO: 1582 - protein, 18 aa, synthetic construct
KTINGSGSPHSKAQLKLT

SEQ ID NO: 1583 - protein, 18 aa, synthetic construct
KTINGSGSPHSKAQNWRT

SEQ ID NO: 1584 - protein, 18 aa, synthetic construct
KTINGSGSPHFLPQNQQT

SEQ ID NO: 1585 - protein, 18 aa, synthetic construct
KTINGSGSPHSKNVRQQT

SEQ ID NO: 1586 - protein, 18 aa, synthetic construct
KTINGSGSPHFMRQNQQT

SEQ ID NO: 1587 - protein, 18 aa, synthetic construct
KTINGSGSPHGWAQNQQT

SEQ ID NO: 1588 - protein, 18 aa, synthetic construct
KTINGSGSPHFHLQNQQT

SEQ ID NO: 1589 - protein, 18 aa, synthetic construct
KTINGSASPHWSAQNQQT

SEQ ID NO: 1590 - protein, 18 aa, synthetic construct
KTINGSSSPHSWAQNQQT

SEQ ID NO: 1591 - protein, 18 aa, synthetic construct
KTINGSGSPHSKAHRQQT

SEQ ID NO: 1592 - protein, 18 aa, synthetic construct
KTINGSGSPHSKQRVQQT

SEQ ID NO: 1593 - protein, 18 aa, synthetic construct
KTLRRSGSPHSKAQNQQT

SEQ ID NO: 1594 - protein, 18 aa, synthetic construct
KTINGSGSPHSKGVRQQT

SEQ ID NO: 1595 - protein, 18 aa, synthetic construct
KTINGSLSPHTWAQNQQT

SEQ ID NO: 1596 - protein, 18 aa, synthetic construct
KTINGSGSPHSKRALQQT

SEQ ID NO: 1597 - protein, 18 aa, synthetic construct
KTINGSGSPHCLSQNQQT

SEQ ID NO: 1598 - protein, 18 aa, synthetic construct
KTINGSGSPHSKAQSLKT

SEQ ID NO: 1599 - protein, 18 aa, synthetic construct
KTINGSGSPHSFVRNQQT

SEQ ID NO: 1600 - protein, 18 aa, synthetic construct
KTINGSGSPHSIFSNQQT

SEQ ID NO: 1601 - protein, 18 aa, synthetic construct
KTINGSGSPHSKVSRQQT

SEQ ID NO: 1602 - protein, 18 aa, synthetic construct
KTINGSGSPHSKARNKQT

SEQ ID NO: 1603 - protein, 18 aa, synthetic construct
KTINASGSPHSKAQGQQT

SEQ ID NO: 1604 - protein, 18 aa, synthetic construct
KTINGSGSPHSKLRMQQT

SEQ ID NO: 1605 - protein, 18 aa, synthetic construct
KTINGSWSPHMLAQNQQT

SEQ ID NO: 1606 - protein, 18 aa, synthetic construct
KTINGSGSPHSLFPNQQT

SEQ ID NO: 1607 - protein, 18 aa, synthetic construct
KPPLGSGSPHSKAQNQQT

SEQ ID NO: 1608 - protein, 18 aa, synthetic construct
KTINGIASPHRKAQNQQT

SEQ ID NO: 1609 - protein, 18 aa, synthetic construct
KTINGSCSPHSLAQNQQT

SEQ ID NO: 1610 - protein, 18 aa, synthetic construct
KTINGRLSPHFKAQNQQT

SEQ ID NO: 1611 - protein, 18 aa, synthetic construct
KTINGSGSPHSKARMTQT

SEQ ID NO: 1612 - protein, 18 aa, synthetic construct
KTINGSGSPHSKARLQQT

SEQ ID NO: 1613 - protein, 18 aa, synthetic construct
KTINGSGSPHSKWVSQQT

SEQ ID NO: 1614 - protein, 18 aa, synthetic construct
KTINGSGSPHSKKVSQQT

SEQ ID NO: 1615 - protein, 18 aa, synthetic construct
KTINGSGSPHSKAQSYRT

SEQ ID NO: 1616 - protein, 18 aa, synthetic construct
KAFNGSGSPHSKAPNQQT

SEQ ID NO: 1617 - protein, 18 aa, synthetic construct
KTINGSGSPHSKAQYRLT

SEQ ID NO: 1618 - protein, 18 aa, synthetic construct
KTINGSWSPHLVAQNQQT

SEQ ID NO: 1619 - protein, 18 aa, synthetic construct
KTINGSGSPHSWTQNQQT

SEQ ID NO: 1620 - protein, 18 aa, synthetic construct
KTINGSGSPHSKAQSHRT

SEQ ID NO: 1621 - protein, 18 aa, synthetic construct
KGINGSGSPHGKAQNQQT

SEQ ID NO: 1622 - protein, 18 aa, synthetic construct
KTINGSGSPHSKAQNRKL

SEQ ID NO: 1623 - protein, 18 aa, synthetic construct
KTINGRYSPHSKAQNQQT

SEQ ID NO: 1624 - protein, 18 aa, synthetic construct
KTINGSGSPHSKGRSQQT

SEQ ID NO: 1625 - protein, 18 aa, synthetic construct
KTINGSGSPHCVAQNQQT

SEQ ID NO: 1626 - protein, 18 aa, synthetic construct
KTINGSGSPHSKIRPQQT

SEQ ID NO: 1627 - protein, 18 aa, synthetic construct
KTINGSGSPHSKAQSSKT

SEQ ID NO: 1628 - protein, 18 aa, synthetic construct
KTINGSGSPHSKRPFQQT

SEQ ID NO: 1629 - protein, 18 aa, synthetic construct
KTINGSSSPHCLAQNQQT

SEQ ID NO: 1630 - protein, 18 aa, synthetic construct
KTINGTRSPHAKAQNQQT

SEQ ID NO: 1631 - protein, 18 aa, synthetic construct
KTINGSGSPHLLFQNQQT

SEQ ID NO: 1632 - protein, 18 aa, synthetic construct
KTINGRRSPHTKAQNQQT

SEQ ID NO: 1633 - protein, 18 aa, synthetic construct
KTINGSGSPHSKASKQQT

SEQ ID NO: 1634 - protein, 18 aa, synthetic construct
KTINGSGSPHSKAQLGRT

SEQ ID NO: 1635 - protein, 18 aa, synthetic construct
KTINGSGSPHSVFLNQQT

SEQ ID NO: 1636 - protein, 18 aa, synthetic construct
KTINGSGSPHSKSARQQT

SEQ ID NO: 1637 - protein, 18 aa, synthetic construct
KTINGSGSPHSKLRLQQT

SEQ ID NO: 1638 - protein, 18 aa, synthetic construct
KTRKSSGSPHSKAQNQQT

SEQ ID NO: 1639 - protein, 18 aa, synthetic construct
KTINGFRSPHLKAQNQQT

SEQ ID NO: 1640 - protein, 18 aa, synthetic construct
KTINGSGSPHSKRSIQQT

SEQ ID NO: 1641 - protein, 18 aa, synthetic construct
KTINGSGSPHSKGRIQQT

SEQ ID NO: 1642 - protein, 18 aa, synthetic construct
KTINGSRSPHRPAQNQQT

SEQ ID NO: 1643 - protein, 18 aa, synthetic construct
KTINGSGSPHSKLRPQQT

SEQ ID NO: 1644 - protein, 18 aa, synthetic construct
KTINGSGSPHMYAQNQQT

SEQ ID NO: 1645 - protein, 18 aa, synthetic construct
KTINGRTSPHAKAQNQQT

SEQ ID NO: 1646 - protein, 18 aa, synthetic construct
KTINGSGSPHSKAGRGQT

SEQ ID NO: 1647 - protein, 18 aa, synthetic construct
KTINGSGSPHSKLMRQQT

SEQ ID NO: 1648 - protein, 18 aa, synthetic construct
KTINGSGSPHSKANKSQT

SEQ ID NO: 1649 - protein, 18 aa, synthetic construct
KTINGSGSPHSKAVRQQT

SEQ ID NO: 1650 - protein, 18 aa, synthetic construct
KTINGSGSPHSKCLSQQT

SEQ ID NO: 1651 - protein, 18 aa, synthetic construct
KTINGSGSPHSKAQWVLT

SEQ ID NO: 1652 - protein, 18 aa, synthetic construct
KTINGSGSPHSKAQFWVT

SEQ ID NO: 1653 - protein, 18 aa, synthetic construct
KTINGSGSPHSKALCRQT

SEQ ID NO: 1654 - protein, 18 aa, synthetic construct
KEVMGSGSPHSKAQNQQT

SEQ ID NO: 1655 - protein, 18 aa, synthetic construct
KTINGSGSPHSKNTRQQT

SEQ ID NO: 1656 - protein, 18 aa, synthetic construct
KTINGSGSPHTWTQNQQT

SEQ ID NO: 1657 - protein, 18 aa, synthetic construct
KTINGSTSPHWSAQNQQT

SEQ ID NO: 1658 - protein, 18 aa, synthetic construct
KTINGNVSPHRKAQNQQT

SEQ ID NO: 1659 - protein, 18 aa, synthetic construct
KTINGSTSPHLFAQNQQT

SEQ ID NO: 1660 - protein, 18 aa, synthetic construct
KTINGSGSPHSKAQNYRA

SEQ ID NO: 1661 - protein, 18 aa, synthetic construct
KTINGSGSPHSKARGQQT

SEQ ID NO: 1662 - protein, 18 aa, synthetic construct
KTINGSGSPHSKAQNRIR

SEQ ID NO: 1663 - protein, 18 aa, synthetic construct
KTINGSGSPHSKWTLQQT

SEQ ID NO: 1664 - protein, 18 aa, synthetic construct
KTINGSGSPHSKAQMKCT

SEQ ID NO: 1665 - protein, 18 aa, synthetic construct
KTINGSGSPHSLWQNQQT

SEQ ID NO: 1666 - protein, 18 aa, synthetic construct
KTINGSGSPHSKAQLSKT

SEQ ID NO: 1667 - protein, 18 aa, synthetic construct
KTINLIWSPHSKAQNQQT

SEQ ID NO: 1668 - protein, 18 aa, synthetic construct
KTINGSGSPHSKRVLQQT

SEQ ID NO: 1669 - protein, 18 aa, synthetic construct
KTINGSGSPHSKVRVQQT

SEQ ID NO: 1670 - protein, 18 aa, synthetic construct
KTINSRFSPHSKAQNQQT

SEQ ID NO: 1671 - protein, 18 aa, synthetic construct
KRSKGSGSPHSKAQNQQT

SEQ ID NO: 1672 - protein, 18 aa, synthetic construct
KTINGSGSPHRRLQNQQT

SEQ ID NO: 1673 - protein, 18 aa, synthetic construct
KTINGSGSPHSCAQNQQT

SEQ ID NO: 1674 - protein, 18 aa, synthetic construct
KTINGPLSPHRKAQNQQT

SEQ ID NO: 1675 - protein, 18 aa, synthetic construct
KTINGSVSPHLYAQNQQT

SEQ ID NO: 1676 - protein, 18 aa, synthetic construct
KTINGRISPHLKAQNQQT

SEQ ID NO: 1677 - protein, 18 aa, synthetic construct
KTINGSHSPHRKAQNQQT

SEQ ID NO: 1678 - protein, 18 aa, synthetic construct
KTINGSGSPHSKAQVSIT

SEQ ID NO: 1679 - protein, 18 aa, synthetic construct
KTINGSMSPHRRAQNQQT

SEQ ID NO: 1680 - protein, 18 aa, synthetic construct
KTINGRQSPHAKAQNQQT

SEQ ID NO: 1681 - protein, 18 aa, synthetic construct
KTINGSGSPHSKAVWRQT

SEQ ID NO: 1682 - protein, 18 aa, synthetic construct
KQPLGSGSPHSKAQNQQT

SEQ ID NO: 1683 - protein, 18 aa, synthetic construct
KTINGSGSPHSKAQNVKL

SEQ ID NO: 1684 - protein, 18 aa, synthetic construct
KTINGSGSPHSKRGTQQT

SEQ ID NO: 1685 - protein, 18 aa, synthetic construct
KTINGSVSPHYVAQNQQT

SEQ ID NO: 1686 - protein, 18 aa, synthetic construct
KTINGSGSPHSKNLRQQT

SEQ ID NO: 1687 - protein, 18 aa, synthetic construct
KTINGSGSPHSKAQAFRT

SEQ ID NO: 1688 - protein, 18 aa, synthetic construct
KTINGSGSPHSKCSNQQT

SEQ ID NO: 1689 - protein, 18 aa, synthetic construct
KELVGSGSPHSKAQNQQT

SEQ ID NO: 1690 - protein, 18 aa, synthetic construct
KTINGSGSPHSLVFNQQT

SEQ ID NO: 1691 - protein, 18 aa, synthetic construct
KTINGSGSPHSKAQATRT

SEQ ID NO: 1692 - protein, 18 aa, synthetic construct
KTINGTSSPHCKAQNQQT

SEQ ID NO: 1693 - protein, 18 aa, synthetic construct
KTINGSGSPHSKALWRQT

SEQ ID NO: 1694 - protein, 18 aa, synthetic construct
KTINGSGSPHSKAQFSVT

SEQ ID NO: 1695 - protein, 18 aa, synthetic construct
KTINGSGSPHSKLYMQQT

SEQ ID NO: 1696 - protein, 18 aa, synthetic construct
KTINGSLSPHYMAQNQQT

SEQ ID NO: 1697 - protein, 18 aa, synthetic construct
KTINGSGSPHSKAWLMQT

SEQ ID NO: 1698 - protein, 18 aa, synthetic construct
KTINGSGSPHSKSLKQQT

SEQ ID NO: 1699 - protein, 18 aa, synthetic construct
KTINGSGSPHSKAQNTRR

SEQ ID NO: 1700 - protein, 18 aa, synthetic construct
KTINGSGSPHYLLQNQQT

SEQ ID NO: 1701 - protein, 18 aa, synthetic construct
KTINGSGSPHTWSQNQQT

SEQ ID NO: 1702 - protein, 18 aa, synthetic construct
KTINGSGSPHSKTRMQQT

SEQ ID NO: 1703 - protein, 18 aa, synthetic construct
KTINTRPSPHSKAQNQQT

SEQ ID NO: 1704 - protein, 18 aa, synthetic construct
KTINGSGSPHSKAQILVT

SEQ ID NO: 1705 - protein, 18 aa, synthetic construct
KTINGSGSPHSKAQNAKS

SEQ ID NO: 1706 - protein, 18 aa, synthetic construct
KTINGSGSPHSRTYNQQT

SEQ ID NO: 1707 - protein, 18 aa, synthetic construct
KTINGSGSPHSKKGGQQT

SEQ ID NO: 1708 - protein, 18 aa, synthetic construct
KTINGYSSPHRKAQNQQT

SEQ ID NO: 1709 - protein, 18 aa, synthetic construct
KTINGSGSPHWVSQNQQT

SEQ ID NO: 1710 - protein, 18 aa, synthetic construct
KTINGSGSPHSKARLAQT

SEQ ID NO: 1711 - protein, 18 aa, synthetic construct
KTINGMCSPHSKAQNQQT

SEQ ID NO: 1712 - protein, 18 aa, synthetic construct
KTINGSGSPHSKSNKQQT

SEQ ID NO: 1713 - protein, 18 aa, synthetic construct
KTINGSGSPHSKAQFVLT

SEQ ID NO: 1714 - protein, 18 aa, synthetic construct
KTINGSISPHFVAQNQQT

SEQ ID NO: 1715 - protein, 18 aa, synthetic construct
KTINGSGSPHRRMQNQQT

SEQ ID NO: 1716 - protein, 18 aa, synthetic construct
KTINGSGSPHSKAWILQT

SEQ ID NO: 1717 - protein, 18 aa, synthetic construct
KTINGSGSPHSKAQGVKT

SEQ ID NO: 1718 - protein, 18 aa, synthetic construct
KTINGSGSPHSKAQFSLT

SEQ ID NO: 1719 - protein, 18 aa, synthetic construct
KTINMLRSPHSKAQNQQT

SEQ ID NO: 1720 - protein, 18 aa, synthetic construct
KTINGSGSPHSKAQLGKT

SEQ ID NO: 1721 - protein, 18 aa, synthetic construct
KTINGSGSPHSMYLNQQT

SEQ ID NO: 1722 - protein, 18 aa, synthetic construct
KTINGHDSPHVTDQNQQT

SEQ ID NO: 1723 - protein, 18 aa, synthetic construct
KTINGHDSPHKRGQHRQT

SEQ ID NO: 1724 - protein, 18 aa, synthetic construct
KMPEGHDSPHKSGQNQQT

SEQ ID NO: 1725 - protein, 18 aa, synthetic construct
KMEGGHDSPHKSGQNQQT

SEQ ID NO: 1726 - protein, 18 aa, synthetic construct
KMEYGHDSPHKSGQNQQT

SEQ ID NO: 1727 - protein, 18 aa, synthetic construct
KAEWGHDSPHKSGQNQQT

SEQ ID NO: 1728 - protein, 18 aa, synthetic construct
KCEWGHDSPHKSGQNQQT

SEQ ID NO: 1729 - protein, 18 aa, synthetic construct
KANNGQDSPHKSGQNQQT

SEQ ID NO: 1730 - protein, 18 aa, synthetic construct
KTINGHDSPHLCGQNQQT

SEQ ID NO: 1731 - protein, 18 aa, synthetic construct
KIPEGHDSPHKSGQNQQT

SEQ ID NO: 1732 - protein, 18 aa, synthetic construct
KADMGHDSPHKSGQNQQT

SEQ ID NO: 1733 - protein, 18 aa, synthetic construct
KTINGHLSPHYFGQNQQT

SEQ ID NO: 1734 - protein, 18 aa, synthetic construct
KIEYGHDSPHKSGQNQQT

SEQ ID NO: 1735 - protein, 18 aa, synthetic construct
KADYGHDSPHKSGQNQQT

SEQ ID NO: 1736 - protein, 18 aa, synthetic construct
KIETGHDSPHKSGQNQQT

SEQ ID NO: 1737 - protein, 18 aa, synthetic construct
KTINGHDSPHTNGQKQQT

SEQ ID NO: 1738 - protein, 18 aa, synthetic construct
KMEWGHDSPHKSGQNQQT

SEQ ID NO: 1739 - protein, 18 aa, synthetic construct
KTINGHDSPHWLLQNQQT

SEQ ID NO: 1740 - protein, 18 aa, synthetic construct
KCEYGHDSPHKSGQNQQT

SEQ ID NO: 1741 - protein, 18 aa, synthetic construct
KRINGHDSPHKSGQKQQN

SEQ ID NO: 1742 - protein, 18 aa, synthetic construct
KMEIGHDSPHKSGQNQQT

SEQ ID NO: 1743 - protein, 18 aa, synthetic construct
KLEYGHDSPHKSGQNQQT

SEQ ID NO: 1744 - protein, 18 aa, synthetic construct
KADWGHDSPHKSGQNQQT

SEQ ID NO: 1745 - protein, 18 aa, synthetic construct
KIEIGHDSPHKSGQNQQT

SEQ ID NO: 1746 - protein, 18 aa, synthetic construct
KTIKDNDSPHKSGQNQQT

SEQ ID NO: 1747 - protein, 18 aa, synthetic construct
KDIMGHDSPHKSGQNQQT

SEQ ID NO: 1748 - protein, 18 aa, synthetic construct
KFEQGHDSPHKSGQNQQT

SEQ ID NO: 1749 - protein, 18 aa, synthetic construct
KMEFGHDSPHKSGQNQQT

SEQ ID NO: 1750 - protein, 18 aa, synthetic construct
KCDQGHDSPHKSGQNQQT

SEQ ID NO: 1751 - protein, 18 aa, synthetic construct
KLPEGHDSPHKSGQNQQT

SEQ ID NO: 1752 - protein, 18 aa, synthetic construct
KIENGHDSPHKSGQNQQT

SEQ ID NO: 1753 - protein, 18 aa, synthetic construct
KMESGHDSPHKSGQNQQT

SEQ ID NO: 1754 - protein, 18 aa, synthetic construct
KAEIGHDSPHKSGQNQQT

SEQ ID NO: 1755 - protein, 18 aa, synthetic construct
KVEYGHDSPHKSGQNQQT

SEQ ID NO: 1756 - protein, 18 aa, synthetic construct
KIINGHDSPHKSGLTQQT

SEQ ID NO: 1757 - protein, 18 aa, synthetic construct
KTSNGDDSPHKSGRNQQT

SEQ ID NO: 1758 - protein, 18 aa, synthetic construct
KIEVGHDSPHKSGQNQQT

SEQ ID NO: 1759 - protein, 18 aa, synthetic construct
KMEMGHDSPHKSGQNQQT

SEQ ID NO: 1760 - protein, 18 aa, synthetic construct
KAEVGHDSPHKSGQNQQT

SEQ ID NO: 1761 - protein, 18 aa, synthetic construct
KMDAGHDSPHKSGQNQQT

SEQ ID NO: 1762 - protein, 18 aa, synthetic construct
KVEWGHDSPHKSGQNQQT

SEQ ID NO: 1763 - protein, 18 aa, synthetic construct
KAEQGHDSPHKSGQNQQT

SEQ ID NO: 1764 - protein, 18 aa, synthetic construct
KLEWGHDSPHKSGQNQQT

SEQ ID NO: 1765 - protein, 18 aa, synthetic construct
KTINGHPSPHYLGQNQQT

SEQ ID NO: 1766 - protein, 18 aa, synthetic construct
KTINGHLSPHYYGQNQQT

SEQ ID NO: 1767 - protein, 18 aa, synthetic construct
KMELGHDSPHKSGQNQQT

SEQ ID NO: 1768 - protein, 18 aa, synthetic construct
KMETGHDSPHKSGQNQQT

SEQ ID NO: 1769 - protein, 18 aa, synthetic construct
KMEAGHDSPHKSGQNQQT

SEQ ID NO: 1770 - protein, 18 aa, synthetic construct
KTINGHDSPHLLWQNQQT

SEQ ID NO: 1771 - protein, 18 aa, synthetic construct
KTINRQRSPHKSGQNQQT

SEQ ID NO: 1772 - protein, 18 aa, synthetic construct
KIESGHDSPHKSGQNQQT

SEQ ID NO: 1773 - protein, 18 aa, synthetic construct
KTAKDHDSPHKSGQNQQT

SEQ ID NO: 1774 - protein, 18 aa, synthetic construct
KMEVGHDSPHKSGQNQQT

SEQ ID NO: 1775 - protein, 18 aa, synthetic construct
KCEIGHDSPHKSGQNQQT

SEQ ID NO: 1776 - protein, 18 aa, synthetic construct
KATNGHDSPHKSGLNQQT

SEQ ID NO: 1777 - protein, 18 aa, synthetic construct
KMDGGHDSPHKSGQNQQT

SEQ ID NO: 1778 - protein, 18 aa, synthetic construct
KQEVGHDSPHKSGQNQQT

SEQ ID NO: 1779 - protein, 18 aa, synthetic construct
KADQGHDSPHKSGQNQQT

SEQ ID NO: 1780 - protein, 18 aa, synthetic construct
KTINGHESPHKSAQNHQT

SEQ ID NO: 1781 - protein, 18 aa, synthetic construct
KTINGHDSPHKSAQNQWT

SEQ ID NO: 1782 - protein, 18 aa, synthetic construct
KNMNGHDSPHKSGQNTHS

SEQ ID NO: 1783 - protein, 18 aa, synthetic construct
KTPWEHDSPHKSGQNQQT

SEQ ID NO: 1784 - protein, 18 aa, synthetic construct
KTINGHSSPHYFGQNQQT

SEQ ID NO: 1785 - protein, 18 aa, synthetic construct
KIEMGHDSPHKSGQNQQT

SEQ ID NO: 1786 - protein, 18 aa, synthetic construct
KTANEHDSPHKSGQNQQT

SEQ ID NO: 1787 - protein, 18 aa, synthetic construct
KTINGHDSPHKSGRRRQT

SEQ ID NO: 1788 - protein, 18 aa, synthetic construct
KISNGHDSPHKSAQNQQT

SEQ ID NO: 1789 - protein, 18 aa, synthetic construct
KTGNGHDSPHKSGQYQQT

SEQ ID NO: 1790 - protein, 18 aa, synthetic construct
KTINGHYSPHLFGQNQQT

SEQ ID NO: 1791 - protein, 18 aa, synthetic construct
KTINGNYSPHKIGQNQQT

SEQ ID NO: 1792 - protein, 18 aa, synthetic construct
KTINGHDSPHKSRQNDQT

SEQ ID NO: 1793 - protein, 18 aa, synthetic construct
KQQQGHDSPHKSGQNQQT

SEQ ID NO: 1794 - protein, 18 aa, synthetic construct
KTPQDHDSPHKSGQNQQT

SEQ ID NO: 1795 - protein, 18 aa, synthetic construct
KHDWGHDSPHKSGQNQQT

SEQ ID NO: 1796 - protein, 18 aa, synthetic construct
KIEGGHDSPHKSGQNQQT

SEQ ID NO: 1797-1799 - skipped (3 entries)

SEQ ID NO: 1800 - protein, 13 aa, synthetic construct
GHDSPHKSGQNQQ

SEQ ID NO: 1801 - protein, 13 aa, synthetic construct
GSGSPHSKAQNQQ

SEQ ID NO: 1802 - protein, 13 aa, synthetic construct
GSGSPHSKAQNRH

SEQ ID NO: 1803 - protein, 13 aa, synthetic construct
GSGSPHSKVQNQQ

SEQ ID NO: 1804 - protein, 13 aa, synthetic construct
MSGSPHSKAQNQQ

SEQ ID NO: 1805 - protein, 13 aa, synthetic construct
GRGSPHSKAQNQQ

SEQ ID NO: 1806 - protein, 13 aa, synthetic construct
RNGSPHSKAQNQQ

SEQ ID NO: 1807 - protein, 13 aa, synthetic construct
GSGSPHSKARDQQ

SEQ ID NO: 1808 - protein, 13 aa, synthetic construct
GSGSPHSKAPNLQ

SEQ ID NO: 1809 - protein, 13 aa, synthetic construct
TSGSPHSKAQNQQ

SEQ ID NO: 1810 - protein, 13 aa, synthetic construct
GSGSPHSKAHVRQ

SEQ ID NO: 1811 - protein, 13 aa, synthetic construct
GSGSPHSKAPNQH

SEQ ID NO: 1812 - protein, 13 aa, synthetic construct
ISGSPHSKAQNQQ

SEQ ID NO: 1813 - protein, 13 aa, synthetic construct
GPGSPHSKAHNQQ

SEQ ID NO: 1814 - protein, 13 aa, synthetic construct
GSGSPHSKTQSQQ

SEQ ID NO: 1815 - protein, 13 aa, synthetic construct
ESGSPHSKAQNQQ

SEQ ID NO: 1816 - protein, 13 aa, synthetic construct
GSGSPHSKAQPAK

SEQ ID NO: 1817 - protein, 13 aa, synthetic construct
SSGSPHSKAQNQQ

SEQ ID NO: 1818 - protein, 13 aa, synthetic construct
GNGSPHSKAQNQQ

SEQ ID NO: 1819 - protein, 13 aa, synthetic construct
GSGSPHSKSQTQQ

SEQ ID NO: 1820 - protein, 13 aa, synthetic construct
ASGSPHSKAQNQQ

SEQ ID NO: 1821 - protein, 13 aa, synthetic construct
GSGSPHSKAQNLA

SEQ ID NO: 1822 - protein, 13 aa, synthetic construct
GSGSPHSKSQNQL

SEQ ID NO: 1823 - protein, 13 aa, synthetic construct
NSGSPHSKAQNQQ

SEQ ID NO: 1824 - protein, 13 aa, synthetic construct
GSGSPHSKAQGQQ

SEQ ID NO: 1825 - protein, 13 aa, synthetic construct
VSGSPHSKAQNQQ

SEQ ID NO: 1826 - protein, 13 aa, synthetic construct
GSGSPHSKALNRQ

SEQ ID NO: 1827 - protein, 13 aa, synthetic construct
LSGSPHSKAQNQQ

SEQ ID NO: 1828 - protein, 13 aa, synthetic construct
GSGSPHSKAHNQQ

SEQ ID NO: 1829 - protein, 13 aa, synthetic construct
GSGSPHSKTQNQQ

SEQ ID NO: 1830 - protein, 13 aa, synthetic construct
GGGSPHSKAQTQQ

SEQ ID NO: 1831 - protein, 13 aa, synthetic construct
GSGSPHSKAQNPP

SEQ ID NO: 1832 - protein, 13 aa, synthetic construct
GSGSPHSKAQNLQ

SEQ ID NO: 1833 - protein, 13 aa, synthetic construct
GGGSPHSKAQNQQ

SEQ ID NO: 1834 - protein, 13 aa, synthetic construct
GSGSPHSKAQYQQ

SEQ ID NO: 1835 - protein, 13 aa, synthetic construct
GGGSPHSKAQNKQ

SEQ ID NO: 1836 - protein, 13 aa, synthetic construct
GSGSPHSKAQDQE

SEQ ID NO: 1837 - protein, 13 aa, synthetic construct
KSGSPHSKAQNQQ

SEQ ID NO: 1838 - protein, 13 aa, synthetic construct
GGGSPHSKAQNQL

SEQ ID NO: 1839 - protein, 13 aa, synthetic construct
GSGSPHSKAQNHQ

SEQ ID NO: 1840 - protein, 13 aa, synthetic construct
GSGSPHSKAQDQQ

SEQ ID NO: 1841 - protein, 13 aa, synthetic construct
GGGSPHSKSQNQL

SEQ ID NO: 1842 - protein, 13 aa, synthetic construct
GNGSPHSKAQNKQ

SEQ ID NO: 1843 - protein, 13 aa, synthetic construct
GSGSPHSKGHWQQ

SEQ ID NO: 1844 - protein, 13 aa, synthetic construct
GSGSPHSKAPNQQ

SEQ ID NO: 1845 - protein, 13 aa, synthetic construct
GSGSPHSKAQNQL

SEQ ID NO: 1846 - protein, 13 aa, synthetic construct
GSGSPHSKRPEQQ

SEQ ID NO: 1847 - protein, 13 aa, synthetic construct
GSGSPHSKAQRTM

SEQ ID NO: 1848 - protein, 13 aa, synthetic construct
GNGSPHSKAQNQH

SEQ ID NO: 1849 - protein, 13 aa, synthetic construct
HSGSPHSKAQNQQ

SEQ ID NO: 1850 - protein, 13 aa, synthetic construct
GGGSPHSKALNQQ

SEQ ID NO: 1851 - protein, 13 aa, synthetic construct
GSGSPHSKALHQH

SEQ ID NO: 1852 - protein, 13 aa, synthetic construct
GTGSPHSKAQNHQ

SEQ ID NO: 1853 - protein, 13 aa, synthetic construct
GSGSPHSKAQHRI

SEQ ID NO: 1854 - protein, 13 aa, synthetic construct
GSGSPHSKAQYIH

SEQ ID NO: 1855 - protein, 13 aa, synthetic construct
GGGSPHSKAHNQQ

SEQ ID NO: 1856 - protein, 13 aa, synthetic construct
GSGSPHSKAQKFE

SEQ ID NO: 1857 - protein, 13 aa, synthetic construct
ESGSPHSKAQNHQ

SEQ ID NO: 1858 - protein, 13 aa, synthetic construct
GSGSPHSKAQFPS

SEQ ID NO: 1859 - protein, 13 aa, synthetic construct
PSGSPHSKAQNQQ

SEQ ID NO: 1860 - protein, 13 aa, synthetic construct
GNGSPHSKAQNPL

SEQ ID NO: 1861 - protein, 13 aa, synthetic construct
GGGSPHSKAQSQQ

SEQ ID NO: 1862 - protein, 13 aa, synthetic construct
GSGSPHSKAQAIK

SEQ ID NO: 1863 - protein, 13 aa, synthetic construct
GSGSPHSKGQNRQ

SEQ ID NO: 1864 - protein, 13 aa, synthetic construct
GSGSPHSKAQSQQ

SEQ ID NO: 1865 - protein, 13 aa, synthetic construct
GSVSPHGKAQNQL

SEQ ID NO: 1866 - protein, 13 aa, synthetic construct
ASGSPHSKAQNQL

SEQ ID NO: 1867 - protein, 13 aa, synthetic construct
RSGSPHSKAQNQQ

SEQ ID NO: 1868 - protein, 13 aa, synthetic construct
GSGSPHSKAQYQH

SEQ ID NO: 1869 - protein, 13 aa, synthetic construct
GSGSPHTKAQNPQ

SEQ ID NO: 1870 - protein, 13 aa, synthetic construct
GSGSPHSKGQNPP

SEQ ID NO: 1871 - protein, 13 aa, synthetic construct
GSGSPHSKAQHQL

SEQ ID NO: 1872 - protein, 13 aa, synthetic construct
GSGSPHSKAQSPP

SEQ ID NO: 1873 - protein, 13 aa, synthetic construct
GSGSPHSKAQAKL

SEQ ID NO: 1874 - protein, 13 aa, synthetic construct
GSGSPHSKTKSQQ

SEQ ID NO: 1875 - protein, 13 aa, synthetic construct
GSGSPHSKAQDRP

SEQ ID NO: 1876 - protein, 13 aa, synthetic construct
GIGSPHSKAQNLG

SEQ ID NO: 1877 - protein, 13 aa, synthetic construct
GSGSPHSKAQAFH

SEQ ID NO: 1878 - protein, 13 aa, synthetic construct
GSGSPHSKAQKQQ

SEQ ID NO: 1879 - protein, 13 aa, synthetic construct
GSGSPHSKAQNAQ

SEQ ID NO: 1880 - protein, 13 aa, synthetic construct
WSGSPHSKAQNQQ

SEQ ID NO: 1881 - protein, 13 aa, synthetic construct
GSGSPHSKAHNQL

SEQ ID NO: 1882 - protein, 13 aa, synthetic construct
GNGSPHSKAQNHQ

SEQ ID NO: 1883 - protein, 13 aa, synthetic construct
GGGSPHSKAQNLQ

SEQ ID NO: 1884 - protein, 13 aa, synthetic construct
GSGSPHSKAQKLN

SEQ ID NO: 1885 - protein, 13 aa, synthetic construct
GGGSPHSKSQNQH

SEQ ID NO: 1886 - protein, 13 aa, synthetic construct
GSGSPHSKSQNVQ

SEQ ID NO: 1887 - protein, 13 aa, synthetic construct
GSGSPHSKAQAQQ

SEQ ID NO: 1888 - protein, 13 aa, synthetic construct
DSGSPHSKAQNQQ

SEQ ID NO: 1889 - protein, 13 aa, synthetic construct
ASGSPHSKAPNQQ

SEQ ID NO: 1890 - protein, 13 aa, synthetic construct
GSGSPHSKAQTPP

SEQ ID NO: 1891 - protein, 13 aa, synthetic construct
IDGSPHSKAQNQQ

SEQ ID NO: 1892 - protein, 13 aa, synthetic construct
GSGSPHNKAQNHQ

SEQ ID NO: 1893 - protein, 13 aa, synthetic construct
GSGSPHSKAQPPA

SEQ ID NO: 1894 - protein, 13 aa, synthetic construct
GSGSPHSKAQERP

SEQ ID NO: 1895 - protein, 13 aa, synthetic construct
GSGSPHSKAQDLQ

SEQ ID NO: 1896 - protein, 13 aa, synthetic construct
GGGSPHSKAQNPP

SEQ ID NO: 1897 - protein, 13 aa, synthetic construct
GSGSPHSKAQAMH

SEQ ID NO: 1898 - protein, 13 aa, synthetic construct
GSGSPHSKALNQQ

SEQ ID NO: 1899 - protein, 13 aa, synthetic construct
GSGSPHSKAQHPS

SEQ ID NO: 1900 - protein, 13 aa, synthetic construct
GLGSPHSKSQNQQ

SEQ ID NO: 1901 - protein, 13 aa, synthetic construct
GTGSPHSKAQNQQ

SEQ ID NO: 1902 - protein, 13 aa, synthetic construct
GSGSPHSKAPGLQ

SEQ ID NO: 1903 - protein, 13 aa, synthetic construct
GSGSPHSKAQGIR

SEQ ID NO: 1904 - protein, 13 aa, synthetic construct
GSGSPHSKAQAPA

SEQ ID NO: 1905 - protein, 13 aa, synthetic construct
GSGSPHSKSQSQQ

SEQ ID NO: 1906 - protein, 13 aa, synthetic construct
GSGSPHSKAQIPP

SEQ ID NO: 1907 - protein, 13 aa, synthetic construct
GSGSPHSKAQTQL

SEQ ID NO: 1908 - protein, 13 aa, synthetic construct
GSGSPHSKAQAPS

SEQ ID NO: 1909 - protein, 13 aa, synthetic construct
DAGSPHSKAQNQQ

SEQ ID NO: 1910 - protein, 13 aa, synthetic construct
GSGSPHSKGQNQQ

SEQ ID NO: 1911 - protein, 13 aa, synthetic construct
DGGSPHSKAQNQQ

SEQ ID NO: 1912 - protein, 13 aa, synthetic construct
ASGSPHSKAHNQQ

SEQ ID NO: 1913 - protein, 13 aa, synthetic construct
GSGSPHSKAQNTY

SEQ ID NO: 1914 - protein, 13 aa, synthetic construct
GSGSPHSKSQNQH

SEQ ID NO: 1915 - protein, 13 aa, synthetic construct
GGGSPHSKAQDKQ

SEQ ID NO: 1916 - protein, 13 aa, synthetic construct
GSGSPHSKAQNHL

SEQ ID NO: 1917 - protein, 13 aa, synthetic construct
GSGSPHSKAQIGM

SEQ ID NO: 1918 - protein, 13 aa, synthetic construct
GSGSPHSKALNKQ

SEQ ID NO: 1919 - protein, 13 aa, synthetic construct
GGGSPHSKAQNPQ

SEQ ID NO: 1920 - protein, 13 aa, synthetic construct
GTGSPHSKAPNQL

SEQ ID NO: 1921 - protein, 13 aa, synthetic construct
GSGSPHSKAQLQQ

SEQ ID NO: 1922 - protein, 13 aa, synthetic construct
GGGSPHSKAQYQQ

SEQ ID NO: 1923 - protein, 13 aa, synthetic construct
GGGSPHSKAQHQQ

SEQ ID NO: 1924 - protein, 13 aa, synthetic construct
GSGSPHSKAQRMS

SEQ ID NO: 1925 - protein, 13 aa, synthetic construct
GSGSPHSKAQGIL

SEQ ID NO: 1926 - protein, 13 aa, synthetic construct
GSGSPHSKAQDRQ

SEQ ID NO: 1927 - protein, 13 aa, synthetic construct
GSGSPHSKARDWQ

SEQ ID NO: 1928 - protein, 13 aa, synthetic construct
GSGSPHSKAQNTH

SEQ ID NO: 1929 - protein, 13 aa, synthetic construct
GSGSPHSKAQERS

SEQ ID NO: 1930 - protein, 13 aa, synthetic construct
GSGSPHSKAQNYQ

SEQ ID NO: 1931 - protein, 13 aa, synthetic construct
GSGSPHSKAQRTC

SEQ ID NO: 1932 - protein, 13 aa, synthetic construct
GSGSPHSKAQIGH

SEQ ID NO: 1933 - protein, 13 aa, synthetic construct
GSGSPHSKAQGAI

SEQ ID NO: 1934 - protein, 13 aa, synthetic construct
GSGSPHSKAQVPP

SEQ ID NO: 1935 - protein, 13 aa, synthetic construct
GSGSPHSKAQVQQ

SEQ ID NO: 1936 - protein, 13 aa, synthetic construct
GSGSPHSKALMRQ

SEQ ID NO: 1937 - protein, 13 aa, synthetic construct
GSGSPHSKAQYSV

SEQ ID NO: 1938 - protein, 13 aa, synthetic construct
GSGSPHSKVPNLQ

SEQ ID NO: 1939 - protein, 13 aa, synthetic construct
GSGSPHSKAQAIT

SEQ ID NO: 1940 - protein, 13 aa, synthetic construct
GSGSPHSKAQKTL

SEQ ID NO: 1941 - protein, 13 aa, synthetic construct
GSGSPHSKAQNQW

SEQ ID NO: 1942 - protein, 13 aa, synthetic construct
GSGSPHSKAQLHH

SEQ ID NO: 1943 - protein, 13 aa, synthetic construct
GSGSPHSKAQNII

SEQ ID NO: 1944 - protein, 13 aa, synthetic construct
MEGSPHSKAQNQQ

SEQ ID NO: 1945 - protein, 13 aa, synthetic construct
GSGSPHSKAQGHH

SEQ ID NO: 1946 - protein, 13 aa, synthetic construct
GSGSPHSKAQSKV

SEQ ID NO: 1947 - protein, 13 aa, synthetic construct
GSGSPHSKAQLPS

SEQ ID NO: 1948 - protein, 13 aa, synthetic construct
GSGSPHSKAIGKQ

SEQ ID NO: 1949 - protein, 13 aa, synthetic construct
GGGSPHSKSQNQQ

SEQ ID NO: 1950 - protein, 13 aa, synthetic construct
GSGSPHSKAQAIH

SEQ ID NO: 1951 - protein, 13 aa, synthetic construct
GSGSPHSKAQHGL

SEQ ID NO: 1952 - protein, 13 aa, synthetic construct
GSGSPHSKAQFMC

SEQ ID NO: 1953 - protein, 13 aa, synthetic construct
VSGSPHSKAQGQQ

SEQ ID NO: 1954 - protein, 13 aa, synthetic construct
GGGSPHSKAQNQM

SEQ ID NO: 1955 - protein, 13 aa, synthetic construct
GSGSPHSKAQHLQ

SEQ ID NO: 1956 - protein, 13 aa, synthetic construct
ENGSPHSKAQNQQ

SEQ ID NO: 1957 - protein, 13 aa, synthetic construct
GSGSPHSKTQNHQ

SEQ ID NO: 1958 - protein, 13 aa, synthetic construct
GSGSPHSKAQPAR

SEQ ID NO: 1959 - protein, 13 aa, synthetic construct
GSGSPHSKAQSLQ

SEQ ID NO: 1960 - protein, 13 aa, synthetic construct
GSGSPHSKSQSQL

SEQ ID NO: 1961 - protein, 13 aa, synthetic construct
GSASPHSKAHSQQ

SEQ ID NO: 1962 - protein, 13 aa, synthetic construct
GSGSPHSKAQMPS

SEQ ID NO: 1963 - protein, 13 aa, synthetic construct
GSGSPHSKAQGSL

SEQ ID NO: 1964 - protein, 13 aa, synthetic construct
GSGSPHSKSQNQQ

SEQ ID NO: 1965 - protein, 13 aa, synthetic construct
GNGSPHSKSQNQQ

SEQ ID NO: 1966 - protein, 13 aa, synthetic construct
GSGSPHSKAQVPA

SEQ ID NO: 1967 - protein, 13 aa, synthetic construct
GNGSPHSKAQNLQ

SEQ ID NO: 1968 - protein, 13 aa, synthetic construct
GSGSPHSKAQDKQ

SEQ ID NO: 1969 - protein, 13 aa, synthetic construct
GSGSPHSKAHYQQ

SEQ ID NO: 1970 - protein, 13 aa, synthetic construct
GSGSPHSKAQVPS

SEQ ID NO: 1971 - protein, 13 aa, synthetic construct
GGGSPHSKAQNHQ

SEQ ID NO: 1972 - protein, 13 aa, synthetic construct
GSGSPHSKARGEQ

SEQ ID NO: 1973 - protein, 13 aa, synthetic construct
GGGSPHSKAQYQH

SEQ ID NO: 1974 - protein, 13 aa, synthetic construct
GSGSPHSKAPGQQ

SEQ ID NO: 1975 - protein, 13 aa, synthetic construct
KNGSPHSKAQNQQ

SEQ ID NO: 1976 - protein, 13 aa, synthetic construct
GSGSPHSKRLEQQ

SEQ ID NO: 1977 - protein, 13 aa, synthetic construct
GSGSPHSKAQNQS

SEQ ID NO: 1978 - protein, 13 aa, synthetic construct
GSGSPHSKAQKVI

SEQ ID NO: 1979 - protein, 13 aa, synthetic construct
GSGSPHSKAQNND

SEQ ID NO: 1980 - protein, 13 aa, synthetic construct
GSGSPHSKAQSVH

SEQ ID NO: 1981 - protein, 13 aa, synthetic construct
GSGSPHSKAQPLG

SEQ ID NO: 1982 - protein, 13 aa, synthetic construct
KEGSPHSKAQNQQ

SEQ ID NO: 1983 - protein, 13 aa, synthetic construct
GSGSPHSKAHNQE

SEQ ID NO: 1984 - protein, 13 aa, synthetic construct
GSGSPHSKAQIQQ

SEQ ID NO: 1985 - protein, 13 aa, synthetic construct
GSGSPHSKAQVRN

SEQ ID NO: 1986 - protein, 13 aa, synthetic construct
GSGSPHSKAPSNQ

SEQ ID NO: 1987 - protein, 13 aa, synthetic construct
GSGSPHSKAQVGH

SEQ ID NO: 1988 - protein, 13 aa, synthetic construct
GSGSPHSKAQRDI

SEQ ID NO: 1989 - protein, 13 aa, synthetic construct
GSGSPHSKAQMPN

SEQ ID NO: 1990 - protein, 13 aa, synthetic construct
AIGSPHSKAQNQQ

SEQ ID NO: 1991 - protein, 13 aa, synthetic construct
GSGSPHSKARGLQ

SEQ ID NO: 1992 - protein, 13 aa, synthetic construct
GSGSPHSKLQKQQ

SEQ ID NO: 1993 - protein, 13 aa, synthetic construct
GSGSPHSKAPSLQ

SEQ ID NO: 1994 - protein, 13 aa, synthetic construct
GSGSPHSKAQRDQ

SEQ ID NO: 1995 - protein, 13 aa, synthetic construct
GSGSPHSKNRDQQ

SEQ ID NO: 1996 - protein, 13 aa, synthetic construct
GSGSPHSKAQAKG

SEQ ID NO: 1997 - protein, 13 aa, synthetic construct
GSGSPHSKAQSAH

SEQ ID NO: 1998 - protein, 13 aa, synthetic construct
GNGSPHSKSQNQH

SEQ ID NO: 1999 - protein, 13 aa, synthetic construct
GSGSPHSKSQNHQ

SEQ ID NO: 2000 - protein, 13 aa, synthetic construct
RSGSPHSKAQDQQ

SEQ ID NO: 2001 - protein, 13 aa, synthetic construct
GSGSPHSKAQSTM

SEQ ID NO: 2002 - protein, 13 aa, synthetic construct
GSGSPHSKAQREM

SEQ ID NO: 2003 - protein, 13 aa, synthetic construct
GGGSPHSKSQNRQ

SEQ ID NO: 2004 - protein, 13 aa, synthetic construct
GSGSPHSKAQYRA

SEQ ID NO: 2005 - protein, 13 aa, synthetic construct
GGGSPHSKAQRQQ

SEQ ID NO: 2006 - protein, 13 aa, synthetic construct
GSGSPHSKNQWQQ

SEQ ID NO: 2007 - protein, 13 aa, synthetic construct
GSGSPHSKAQRMN

SEQ ID NO: 2008 - protein, 13 aa, synthetic construct
GSGSPHAKAQNHQ

SEQ ID NO: 2009 - protein, 13 aa, synthetic construct
GSGSPHSKAGDSQ

SEQ ID NO: 2010 - protein, 13 aa, synthetic construct
GSGSPHSKLKSQQ

SEQ ID NO: 2011 - protein, 13 aa, synthetic construct
GSGSPHSKAQKIS

SEQ ID NO: 2012 - protein, 13 aa, synthetic construct
GSGSPHSKAPSMQ

SEQ ID NO: 2013 - protein, 13 aa, synthetic construct
GSGSPHSKASPRQ

SEQ ID NO: 2014 - protein, 13 aa, synthetic construct
GSGSPHSKRMEQQ

SEQ ID NO: 2015 - protein, 13 aa, synthetic construct
GSGSPHSKAQYQN

SEQ ID NO: 2016 - protein, 13 aa, synthetic construct
GSGSPHARMQNQQ

SEQ ID NO: 2017 - protein, 13 aa, synthetic construct
GSGSPHVKSQNQQ

SEQ ID NO: 2018 - protein, 13 aa, synthetic construct
GQDSPHKSGQNQQ

SEQ ID NO: 2019 - protein, 13 aa, synthetic construct
GSGSPHASRQNQQ

SEQ ID NO: 2020 - protein, 13 aa, synthetic construct
GSGSPHASRQNKQ

SEQ ID NO: 2021 - protein, 13 aa, synthetic construct
GSGSPHVKIQNQQ

SEQ ID NO: 2022 - protein, 13 aa, synthetic construct
GSGSPHSKAKNQQ

SEQ ID NO: 2023 - protein, 13 aa, synthetic construct
GSGSPHKKNQNQQ

SEQ ID NO: 2024 - protein, 13 aa, synthetic construct
GSGSPHVRMQNQQ

SEQ ID NO: 2025 - protein, 13 aa, synthetic construct
GSGSPHASRQKQQ

SEQ ID NO: 2026 - protein, 13 aa, synthetic construct
GHSSPHRSGQNQQ

SEQ ID NO: 2027 - protein, 13 aa, synthetic construct
GSGSPHTRGQNQQ

SEQ ID NO: 2028 - protein, 13 aa, synthetic construct
CSGSPHSKAQNQQ

SEQ ID NO: 2029 - protein, 13 aa, synthetic construct
GSGSPHRKAQNQQ

SEQ ID NO: 2030 - protein, 13 aa, synthetic construct
GSGSPHSKAQNKQ

SEQ ID NO: 2031 - protein, 13 aa, synthetic construct
GSGSPHSKAQTQQ

SEQ ID NO: 2032 - protein, 13 aa, synthetic construct
CSGSPHKTSQNQQ

SEQ ID NO: 2033 - protein, 13 aa, synthetic construct
CSHSPHKSGQNQQ

SEQ ID NO: 2034 - protein, 13 aa, synthetic construct
GQSSPHRSGQNQQ

SEQ ID NO: 2035 - protein, 13 aa, synthetic construct
GRGSPHASRQNQQ

SEQ ID NO: 2036 - protein, 13 aa, synthetic construct
GSGSPHASRKNQQ

SEQ ID NO: 2037 - protein, 13 aa, synthetic construct
GSGSPHASRQNQH

SEQ ID NO: 2038 - protein, 13 aa, synthetic construct
GSGSPHKFGKNQQ

SEQ ID NO: 2039 - protein, 13 aa, synthetic construct
GSGSPHKFGQKQQ

SEQ ID NO: 2040 - protein, 13 aa, synthetic construct
GSGSPHKFGQNQQ

SEQ ID NO: 2041 - protein, 13 aa, synthetic construct
GSGSPHKIGQNQQ

SEQ ID NO: 2042 - protein, 13 aa, synthetic construct
GSGSPHKLGQNQQ

SEQ ID NO: 2043 - protein, 13 aa, synthetic construct
GSGSPHKTSKNQQ

SEQ ID NO: 2044 - protein, 13 aa, synthetic construct
GSGSPHKTSQKQQ

SEQ ID NO: 2045 - protein, 13 aa, synthetic construct
GSGSPHKTSQNQQ

SEQ ID NO: 2046 - protein, 13 aa, synthetic construct
GSGSPHKTTQNQQ

SEQ ID NO: 2047 - protein, 13 aa, synthetic construct
GSGSPHKTYQNQQ

SEQ ID NO: 2048 - protein, 13 aa, synthetic construct
GSGSPHKYGQNQQ

SEQ ID NO: 2049 - protein, 13 aa, synthetic construct
GSGSPHSKAQHQQ

SEQ ID NO: 2050 - protein, 13 aa, synthetic construct
GSGSPHSKDQNQQ

SEQ ID NO: 2051 - protein, 13 aa, synthetic construct
GSGSPHSKPQNQQ

SEQ ID NO: 2052 - protein, 13 aa, synthetic construct
GSGSPHVRGQKQQ

SEQ ID NO: 2053 - protein, 13 aa, synthetic construct
GSGSPHVRGQNKQ

SEQ ID NO: 2054 - protein, 13 aa, synthetic construct
GSHSPHKRGQNQQ

SEQ ID NO: 2055 - protein, 13 aa, synthetic construct
GSHSPHKSGQKQQ

SEQ ID NO: 2056 - protein, 13 aa, synthetic construct
GSHSPHKSGQNQQ

SEQ ID NO: 2057 - protein, 13 aa, synthetic construct
VSGSPHASRQNQQ

SEQ ID NO: 2058 - protein, 13 aa, synthetic construct
VSGSPHGARQNQQ

SEQ ID NO: 2059 - protein, 13 aa, synthetic construct
VSGSPHKFGQNQQ

SEQ ID NO: 2060 - protein, 13 aa, synthetic construct
GSGSPHSKAQYYV

SEQ ID NO: 2061 - protein, 13 aa, synthetic construct
GSGSPHSKLRRQQ

SEQ ID NO: 2062 - protein, 13 aa, synthetic construct
GSGSPHSKAGCGQ

SEQ ID NO: 2063 - protein, 13 aa, synthetic construct
GSGSPHSRAQNQQ

SEQ ID NO: 2064 - protein, 13 aa, synthetic construct
GSGSPHSKRLRQQ

SEQ ID NO: 2065 - protein, 13 aa, synthetic construct
GSGSPHSLRRNQQ

SEQ ID NO: 2066 - protein, 13 aa, synthetic construct
GSGSPHSRGRNQQ

SEQ ID NO: 2067 - protein, 13 aa, synthetic construct
GSGSPHSSRRNQQ

SEQ ID NO: 2068 - protein, 13 aa, synthetic construct
GSGSPHSKAFRLQ

SEQ ID NO: 2069 - protein, 13 aa, synthetic construct
GSCSPHRKAQNQQ

SEQ ID NO: 2070 - protein, 13 aa, synthetic construct
GSGSPHFLRQNQQ

SEQ ID NO: 2071 - protein, 13 aa, synthetic construct
GSGSPHSLRFNQQ

SEQ ID NO: 2072 - protein, 13 aa, synthetic construct
GSGSPHSKWLLQQ

SEQ ID NO: 2073 - protein, 13 aa, synthetic construct
GSGSPHSKRRLQQ

SEQ ID NO: 2074 - protein, 13 aa, synthetic construct
GSGSPHSKAQRKL

SEQ ID NO: 2075 - protein, 13 aa, synthetic construct
GSGSPHSKALRRQ

SEQ ID NO: 2076 - protein, 13 aa, synthetic construct
GSGSPHSKAQRLR

SEQ ID NO: 2077 - protein, 13 aa, synthetic construct
GSGSPHSKAQRRL

SEQ ID NO: 2078 - protein, 13 aa, synthetic construct
GSGSPHSKARRQQ

SEQ ID NO: 2079 - protein, 13 aa, synthetic construct
GSGSPHSKARRLQ

SEQ ID NO: 2080 - protein, 13 aa, synthetic construct
GSGSPHSKSRRQQ

SEQ ID NO: 2081 - protein, 13 aa, synthetic construct
GLLSPHWKAQNQQ

SEQ ID NO: 2082 - protein, 13 aa, synthetic construct
GSGSPHSKARLRQ

SEQ ID NO: 2083 - protein, 13 aa, synthetic construct
GSGSPHSKASKRQ

SEQ ID NO: 2084 - protein, 13 aa, synthetic construct
GSGSPHVRRQNQQ

SEQ ID NO: 2085 - protein, 13 aa, synthetic construct
GSGSPHSKAQLYR

SEQ ID NO: 2086 - protein, 13 aa, synthetic construct
GSGSPHSKAQLTV

SEQ ID NO: 2087 - protein, 13 aa, synthetic construct
GHDSPHKRGQHRQ

SEQ ID NO: 2088 - protein, 13 aa, synthetic construct
GHDSPHKSGQKQQ

SEQ ID NO: 2089 - protein, 13 aa, synthetic construct
GHDSPHKSGLTQQ

SEQ ID NO: 2090 - protein, 13 aa, synthetic construct
GDDSPHKSGRNQQ

SEQ ID NO: 2091 - protein, 13 aa, synthetic construct
GHDSPHKSGLNQQ

SEQ ID NO: 2092 - protein, 13 aa, synthetic construct
GHESPHKSAQNHQ

SEQ ID NO: 2093 - protein, 13 aa, synthetic construct
GHDSPHKSAQNQW

SEQ ID NO: 2094 - protein, 13 aa, synthetic construct
GHDSPHKSGQNTH

SEQ ID NO: 2095 - protein, 13 aa, synthetic construct
GHDSPHKSGRRRQ

SEQ ID NO: 2096 - protein, 13 aa, synthetic construct
GHDSPHKSAQNQQ

SEQ ID NO: 2097 - protein, 13 aa, synthetic construct
GHDSPHKSGQYQQ

SEQ ID NO: 2098 - protein, 13 aa, synthetic construct
GNYSPHKIGQNQQ

SEQ ID NO: 2099 - protein, 13 aa, synthetic construct
GHDSPHKSRQNDQ

SEQ ID NO: 2100 - protein, 13 aa, synthetic construct
GHDSPHKSGQIRQ

SEQ ID NO: 2101 - protein, 13 aa, synthetic construct
GHDSPHKIGQNQH

SEQ ID NO: 2102 - protein, 13 aa, synthetic construct
GYDSPHKSGQKQQ

SEQ ID NO: 2103 - protein, 13 aa, synthetic construct
GHDSPHKSGQSVQ

SEQ ID NO: 2104 - protein, 13 aa, synthetic construct
GHESPHKSGRSQQ

SEQ ID NO: 2105 - protein, 13 aa, synthetic construct
GHDSPHKSGQNKL

SEQ ID NO: 2106 - protein, 13 aa, synthetic construct
GHDSPHKTGQNQQ

SEQ ID NO: 2107 - protein, 13 aa, synthetic construct
GRGSPHKRGQNQQ

SEQ ID NO: 2108 - protein, 13 aa, synthetic construct
GSGSPHTKAQNPP

SEQ ID NO: 2109 - protein, 13 aa, synthetic construct
GQDSPHKSGQHQQ

SEQ ID NO: 2110 - protein, 13 aa, synthetic construct
GHDSPHKSGQIQH

SEQ ID NO: 2111 - protein, 13 aa, synthetic construct
GHDSPHKSGPRQQ

SEQ ID NO: 2112 - protein, 13 aa, synthetic construct
GHDSPHKSGHTQQ

SEQ ID NO: 2113 - protein, 13 aa, synthetic construct
GHDSPHKSGQRQH

SEQ ID NO: 2114 - protein, 13 aa, synthetic construct
GSGSPHTKAQNQQ

SEQ ID NO: 2115 - protein, 13 aa, synthetic construct
GHDSPHKSAQSQQ

SEQ ID NO: 2116 - protein, 13 aa, synthetic construct
GHESPHKSGQNQQ

SEQ ID NO: 2117 - protein, 13 aa, synthetic construct
GHDSPHKSLQNQQ

SEQ ID NO: 2118 - protein, 13 aa, synthetic construct
GHGSPHSKAQNPQ

SEQ ID NO: 2119 - protein, 13 aa, synthetic construct
GHDSPHKSGRNQE

SEQ ID NO: 2120 - protein, 13 aa, synthetic construct
GHDSPHKSGQTQL

SEQ ID NO: 2121 - protein, 13 aa, synthetic construct
GHDSPHKSEKNQQ

SEQ ID NO: 2122 - protein, 13 aa, synthetic construct
GRDSPHKSGQDQQ

SEQ ID NO: 2123 - protein, 13 aa, synthetic construct
GHDSPHKTGHNQQ

SEQ ID NO: 2124 - protein, 13 aa, synthetic construct
GYDSPHKSGQTQQ

SEQ ID NO: 2125 - protein, 13 aa, synthetic construct
GHESPHKSGQTQQ

SEQ ID NO: 2126 - protein, 13 aa, synthetic construct
GHDSPHKSGQSKQ

SEQ ID NO: 2127 - protein, 13 aa, synthetic construct
GHDSPHKTGQNQP

SEQ ID NO: 2128 - protein, 13 aa, synthetic construct
GHDSPHKSGQSPQ

SEQ ID NO: 2129 - protein, 13 aa, synthetic construct
GNDSPHKSVQNQQ

SEQ ID NO: 2130 - protein, 13 aa, synthetic construct
GHDSPHKSAQNYQ

SEQ ID NO: 2131 - protein, 13 aa, synthetic construct
GSASPHSKALNQQ

SEQ ID NO: 2132 - protein, 13 aa, synthetic construct
GHESPHKSAQNRQ

SEQ ID NO: 2133 - protein, 13 aa, synthetic construct
GQDSPHKIGQNQQ

SEQ ID NO: 2134 - protein, 13 aa, synthetic construct
GHDSPHKSGQNHL

SEQ ID NO: 2135 - protein, 13 aa, synthetic construct
GHDSPHKSGQYQH

SEQ ID NO: 2136 - protein, 13 aa, synthetic construct
GNDSPHKSVQNHQ

SEQ ID NO: 2137 - protein, 13 aa, synthetic construct
GHDSPHKSGQNQW

SEQ ID NO: 2138 - protein, 13 aa, synthetic construct
GHDSPHKSVQNQH

SEQ ID NO: 2139 - protein, 13 aa, synthetic construct
GHDSPHKSGQNQH

SEQ ID NO: 2140 - protein, 13 aa, synthetic construct
GHDSPHKSGQTRQ

SEQ ID NO: 2141 - protein, 13 aa, synthetic construct
GHDSPHKSGQNLH

SEQ ID NO: 2142 - protein, 13 aa, synthetic construct
GHDSPHKSAQNQE

SEQ ID NO: 2143 - protein, 13 aa, synthetic construct
GHDSPHKSGQHLQ

SEQ ID NO: 2144 - protein, 13 aa, synthetic construct
GHDSPHKSRLNQP

SEQ ID NO: 2145 - protein, 13 aa, synthetic construct
GQDSPHKSGQNQD

SEQ ID NO: 2146 - protein, 13 aa, synthetic construct
GHDSPHKSGRNQQ

SEQ ID NO: 2147 - protein, 13 aa, synthetic construct
GHDSPHKSGQNLL

SEQ ID NO: 2148 - protein, 13 aa, synthetic construct
GHDSPHKSGQLVI

SEQ ID NO: 2149 - protein, 13 aa, synthetic construct
GHDSPHKSRQSQQ

SEQ ID NO: 2150 - protein, 13 aa, synthetic construct
GHDSPHKSGRTQE

SEQ ID NO: 2151 - protein, 13 aa, synthetic construct
GHDSPHKSVQTHQ

SEQ ID NO: 2152 - protein, 13 aa, synthetic construct
GHDSPHKSGQNQP

SEQ ID NO: 2153 - protein, 13 aa, synthetic construct
GHDSPHKSGQTQQ

SEQ ID NO: 2154 - protein, 13 aa, synthetic construct
GPDSPHKIGQNQQ

SEQ ID NO: 2155 - protein, 13 aa, synthetic construct
GHDSPHKSVQNQQ

SEQ ID NO: 2156 - protein, 13 aa, synthetic construct
GHDSPHKSRQDQH

SEQ ID NO: 2157 - protein, 13 aa, synthetic construct
GPDSPHKSGQKQQ

SEQ ID NO: 2158 - protein, 13 aa, synthetic construct
GHDSPHKSRQSQH

SEQ ID NO: 2159 - protein, 13 aa, synthetic construct
GHDSPHKSVQNQL

SEQ ID NO: 2160 - protein, 13 aa, synthetic construct
GYDSPHKSGQYQH

SEQ ID NO: 2161 - protein, 13 aa, synthetic construct
GHDSPHKSRQNQQ

SEQ ID NO: 2162 - protein, 13 aa, synthetic construct
GHDSPHKSWVRQQ

SEQ ID NO: 2163 - protein, 13 aa, synthetic construct
GHESPHKSGQNQH

SEQ ID NO: 2164 - protein, 13 aa, synthetic construct
GHDSPHKIGHNQQ

SEQ ID NO: 2165 - protein, 13 aa, synthetic construct
GHDSPHKSNAWQQ

SEQ ID NO: 2166 - protein, 13 aa, synthetic construct
GHDSPHKSGQSVP

SEQ ID NO: 2167 - protein, 13 aa, synthetic construct
GHESPHKSGQNIQ

SEQ ID NO: 2168 - protein, 13 aa, synthetic construct
GHDSPHKSVQNHL

SEQ ID NO: 2169 - protein, 13 aa, synthetic construct
GHDSPHKIGLDQQ

SEQ ID NO: 2170 - protein, 13 aa, synthetic construct
ASGSPHSKAQHQQ

SEQ ID NO: 2171 - protein, 13 aa, synthetic construct
GHDSPHKRGPDQQ

SEQ ID NO: 2172 - protein, 13 aa, synthetic construct
GMGSPHSKTQNQQ

SEQ ID NO: 2173 - protein, 13 aa, synthetic construct
GHDSPHKSGESQQ

SEQ ID NO: 2174 - protein, 13 aa, synthetic construct
GHDSPHKHGQNHQ

SEQ ID NO: 2175 - protein, 13 aa, synthetic construct
GTGSPHSKAQNQL

SEQ ID NO: 2176 - protein, 13 aa, synthetic construct
GHDSPHKSVQNKQ

SEQ ID NO: 2177 - protein, 13 aa, synthetic construct
GQVSPHKSGQNQQ

SEQ ID NO: 2178 - protein, 13 aa, synthetic construct
GHDSPHKSGQRQL

SEQ ID NO: 2179 - protein, 13 aa, synthetic construct
GHDSPHKIGQNQL

SEQ ID NO: 2180 - protein, 13 aa, synthetic construct
GHDSPHKSGQIIV

SEQ ID NO: 2181 - protein, 13 aa, synthetic construct
GYDSPHKSGQKQS

SEQ ID NO: 2182 - protein, 13 aa, synthetic construct
GNGSPHSKAQNQE

SEQ ID NO: 2183 - protein, 13 aa, synthetic construct
GDDSPHKSVQNQQ

SEQ ID NO: 2184 - protein, 13 aa, synthetic construct
GHDSPHKSVQSHQ

SEQ ID NO: 2185 - protein, 13 aa, synthetic construct
GHDSPHKSGQFVV

SEQ ID NO: 2186 - protein, 13 aa, synthetic construct
GHDSPHKSRQNLQ

SEQ ID NO: 2187 - protein, 13 aa, synthetic construct
GHNSPHKSGQNQE

SEQ ID NO: 2188 - protein, 13 aa, synthetic construct
GHDSPHKSGQSQP

SEQ ID NO: 2189 - protein, 13 aa, synthetic construct
GHESPHKSGQNEQ

SEQ ID NO: 2190 - protein, 13 aa, synthetic construct
GHDSPHKSGQNQL

SEQ ID NO: 2191 - protein, 13 aa, synthetic construct
GHDSPHKSAQNLL

SEQ ID NO: 2192 - protein, 13 aa, synthetic construct
ASGSPHSKAINQQ

SEQ ID NO: 2193 - protein, 13 aa, synthetic construct
GNGSPHKRGQNQQ

SEQ ID NO: 2194 - protein, 13 aa, synthetic construct
GHDSPHKSGQSLQ

SEQ ID NO: 2195 - protein, 13 aa, synthetic construct
GHDSPHKSAQNHQ

SEQ ID NO: 2196 - protein, 13 aa, synthetic construct
GHDSPHKSGRNRQ

SEQ ID NO: 2197 - protein, 13 aa, synthetic construct
GHDSPHKYGQNEQ

SEQ ID NO: 2198 - protein, 13 aa, synthetic construct
GNGSPHSKAPNLQ

SEQ ID NO: 2199 - protein, 13 aa, synthetic construct
GHDSPHKSQQNQQ

SEQ ID NO: 2200 - protein, 13 aa, synthetic construct
GHDSPHKSVQSKQ

SEQ ID NO: 2201 - protein, 13 aa, synthetic construct
GNDSPHKIGHNQQ

SEQ ID NO: 2202 - protein, 13 aa, synthetic construct
GGGSPHSKAQDQQ

SEQ ID NO: 2203 - protein, 13 aa, synthetic construct
GQDSPHKSGQNPL

SEQ ID NO: 2204 - protein, 13 aa, synthetic construct
ASGSPHSKAQNHQ

SEQ ID NO: 2205 - protein, 13 aa, synthetic construct
GHDSPHKSGRDQK

SEQ ID NO: 2206 - protein, 13 aa, synthetic construct
GHDSPHKSVHNQQ

SEQ ID NO: 2207 - protein, 13 aa, synthetic construct
GHDSPHKSGQWKR

SEQ ID NO: 2208 - protein, 13 aa, synthetic construct
GSGSPHSKAENRQ

SEQ ID NO: 2209 - protein, 13 aa, synthetic construct
GHDSPHKSGQSQQ

SEQ ID NO: 2210 - protein, 13 aa, synthetic construct
GHDSPHKSRQAQQ

SEQ ID NO: 2211 - protein, 13 aa, synthetic construct
GHDSPHKSVQNHQ

SEQ ID NO: 2212 - protein, 13 aa, synthetic construct
GHDSPHKSKQNQQ

SEQ ID NO: 2213 - protein, 13 aa, synthetic construct
GHDSPHKSAQNQL

SEQ ID NO: 2214 - protein, 13 aa, synthetic construct
GHDSPHKSGQTQP

SEQ ID NO: 2215 - protein, 13 aa, synthetic construct
GHDSPHKLWINQQ

SEQ ID NO: 2216 - protein, 13 aa, synthetic construct
GPDSPHKSGQNQQ

SEQ ID NO: 2217 - protein, 13 aa, synthetic construct
GHDSPHKSVQKQL

SEQ ID NO: 2218 - protein, 13 aa, synthetic construct
GHPSPHWKGQNQQ

SEQ ID NO: 2219 - protein, 13 aa, synthetic construct
GHDSPHKSGRNQL

SEQ ID NO: 2220 - protein, 13 aa, synthetic construct
GSGSPHSKVQDQQ

SEQ ID NO: 2221 - protein, 13 aa, synthetic construct
GHDSPHKMGRNQQ

SEQ ID NO: 2222 - protein, 13 aa, synthetic construct
GHDSPHKSGISIQ

SEQ ID NO: 2223 - protein, 13 aa, synthetic construct
GHDSPHKSVQNLQ

SEQ ID NO: 2224 - protein, 13 aa, synthetic construct
GHDSPHKMAHNQQ

SEQ ID NO: 2225 - protein, 13 aa, synthetic construct
GHDSPHKHGQNQQ

SEQ ID NO: 2226 - protein, 13 aa, synthetic construct
GHDSPHKSVQSQQ

SEQ ID NO: 2227 - protein, 13 aa, synthetic construct
GHDSPHKSGQTVC

SEQ ID NO: 2228 - protein, 13 aa, synthetic construct
GQDSPHKSGQYQQ

SEQ ID NO: 2229 - protein, 13 aa, synthetic construct
GHDSPHKSGQQIM

SEQ ID NO: 2230 - protein, 13 aa, synthetic construct
GHDSPHKSRQNEQ

SEQ ID NO: 2231 - protein, 13 aa, synthetic construct
GHDSPHKSGLNHQ

SEQ ID NO: 2232 - protein, 13 aa, synthetic construct
GYDSPHKSGQNQQ

SEQ ID NO: 2233 - protein, 13 aa, synthetic construct
GHDSPHKSGQNLQ

SEQ ID NO: 2234 - protein, 13 aa, synthetic construct
GHDSPHKSRQDQQ

SEQ ID NO: 2235 - protein, 13 aa, synthetic construct
GDDSPHKSGQKQL

SEQ ID NO: 2236 - protein, 13 aa, synthetic construct
GSGSPHSKAQNQA

SEQ ID NO: 2237 - protein, 13 aa, synthetic construct
GDDSPHKSGHNQQ

SEQ ID NO: 2238 - protein, 13 aa, synthetic construct
GHDSPHKSGQMIH

SEQ ID NO: 2239 - protein, 13 aa, synthetic construct
GHDSPHKSGRNHQ

SEQ ID NO: 2240 - protein, 13 aa, synthetic construct
GHDSPHKSVQNRQ

SEQ ID NO: 2241 - protein, 13 aa, synthetic construct
GHDSPHKSGQKMN

SEQ ID NO: 2242 - protein, 16 aa, synthetic construct
TINGSGSPHSKAQNQQ

SEQ ID NO: 2243 - protein, 16 aa, synthetic construct
TINGHDSPHKSGQNQQ

SEQ ID NO: 2244 - protein, 16 aa, synthetic construct
TIIGSGSPHSKAQNRH

SEQ ID NO: 2245 - protein, 16 aa, synthetic construct
TFPGSGSPHSKVQNQQ

SEQ ID NO: 2246 - protein, 16 aa, synthetic construct
TEKMSGSPHSKAQNQQ

SEQ ID NO: 2247 - protein, 16 aa, synthetic construct
EINGRGSPHSKAQNQQ

SEQ ID NO: 2248 - protein, 16 aa, synthetic construct
TVNRNGSPHSKAQNQQ

SEQ ID NO: 2249 - protein, 16 aa, synthetic construct
TVNGSGSPHSKARDQQ

SEQ ID NO: 2250 - protein, 16 aa, synthetic construct
TFNGSGSPHSKAPNLQ

SEQ ID NO: 2251 - protein, 16 aa, synthetic construct
TEKTSGSPHSKAQNQQ

SEQ ID NO: 2252 - protein, 16 aa, synthetic construct
TINGSGSPHSKAHVRQ

SEQ ID NO: 2253 - protein, 16 aa, synthetic construct
TVNGSGSPHSKAPNQH

SEQ ID NO: 2254 - protein, 16 aa, synthetic construct
TEKISGSPHSKAQNQQ

SEQ ID NO: 2255 - protein, 16 aa, synthetic construct
TINGPGSPHSKAHNQQ

SEQ ID NO: 2256 - protein, 16 aa, synthetic construct
TVNGSGSPHSKTQSQQ

SEQ ID NO: 2257 - protein, 16 aa, synthetic construct
SINESGSPHSKAQNQQ

SEQ ID NO: 2258 - protein, 16 aa, synthetic construct
TERTSGSPHSKAQNQQ

SEQ ID NO: 2259 - protein, 16 aa, synthetic construct
TINGSGSPHSKAQPAK

SEQ ID NO: 2260 - protein, 16 aa, synthetic construct
TEKSSGSPHSKAQNQQ

SEQ ID NO: 2261 - protein, 16 aa, synthetic construct
TSYGNGSPHSKAQNQQ

SEQ ID NO: 2262 - protein, 16 aa, synthetic construct
TEKGSGSPHSKAQNQQ

SEQ ID NO: 2263 - protein, 16 aa, synthetic construct
TINGSGSPHSKSQTQQ

SEQ ID NO: 2264 - protein, 16 aa, synthetic construct
TERISGSPHSKAQNQQ

SEQ ID NO: 2265 - protein, 16 aa, synthetic construct
TERASGSPHSKAQNQQ

SEQ ID NO: 2266 - protein, 16 aa, synthetic construct
ELHGSGSPHSKAQNQQ

SEQ ID NO: 2267 - protein, 16 aa, synthetic construct
AINGSGSPHSKAQNLA

SEQ ID NO: 2268 - protein, 16 aa, synthetic construct
TVNGSGSPHSKSQNQL

SEQ ID NO: 2269 - protein, 16 aa, synthetic construct
TERNSGSPHSKAQNQQ

SEQ ID NO: 2270 - protein, 16 aa, synthetic construct
SVNGNGSPHSKAQNQQ

SEQ ID NO: 2271 - protein, 16 aa, synthetic construct
TFNGSGSPHSKAQGQQ

SEQ ID NO: 2272 - protein, 16 aa, synthetic construct
TERVSGSPHSKAQNQQ

SEQ ID NO: 2273 - protein, 16 aa, synthetic construct
TINGSGSPHSKALNRQ

SEQ ID NO: 2274 - protein, 16 aa, synthetic construct
TERLSGSPHSKAQNQQ

SEQ ID NO: 2275 - protein, 16 aa, synthetic construct
TDNGSGSPHSKAHNQQ

SEQ ID NO: 2276 - protein, 16 aa, synthetic construct
TFHGSGSPHSKTQNQQ

SEQ ID NO: 2277 - protein, 16 aa, synthetic construct
TINGGGSPHSKAQTQQ

SEQ ID NO: 2278 - protein, 16 aa, synthetic construct
TSNGSGSPHSKAQNPP

SEQ ID NO: 2279 - protein, 16 aa, synthetic construct
TINGSGSPHSKAQNLQ

SEQ ID NO: 2280 - protein, 16 aa, synthetic construct
TVHGNGSPHSKAQNQQ

SEQ ID NO: 2281 - protein, 16 aa, synthetic construct
TINGGGSPHSKAQNQQ

SEQ ID NO: 2282 - protein, 16 aa, synthetic construct
TENMSGSPHSKAQNQQ

SEQ ID NO: 2283 - protein, 16 aa, synthetic construct
TENVSGSPHSKAQNQQ

SEQ ID NO: 2284 - protein, 16 aa, synthetic construct
TSSGSGSPHSKAQYQQ

SEQ ID NO: 2285 - protein, 16 aa, synthetic construct
TIDGGGSPHSKAQNKQ

SEQ ID NO: 2286 - protein, 16 aa, synthetic construct
TEKVSGSPHSKAQNQQ

SEQ ID NO: 2287 - protein, 16 aa, synthetic construct
AINGSGSPHSKAQDQE

SEQ ID NO: 2288 - protein, 16 aa, synthetic construct
TCNKSGSPHSKAQNQQ

SEQ ID NO: 2289 - protein, 16 aa, synthetic construct
TINGGGSPHSKAQNQL

SEQ ID NO: 2290 - protein, 16 aa, synthetic construct
NINGGGSPHSKAQNQQ

SEQ ID NO: 2291 - protein, 16 aa, synthetic construct
TEHLSGSPHSKAQNQQ

SEQ ID NO: 2292 - protein, 16 aa, synthetic construct
AEMGSGSPHSKAQNQQ

SEQ ID NO: 2293 - protein, 16 aa, synthetic construct
ATNGSGSPHSKAQNHQ

SEQ ID NO: 2294 - protein, 16 aa, synthetic construct
AIKGSGSPHSKAQDQQ

SEQ ID NO: 2295 - protein, 16 aa, synthetic construct
TINGGGSPHSKSQNQL

SEQ ID NO: 2296 - protein, 16 aa, synthetic construct
TVNGNGSPHSKAQNKQ

SEQ ID NO: 2297 - protein, 16 aa, synthetic construct
TINGSGSPHSKGHWQQ

SEQ ID NO: 2298 - protein, 16 aa, synthetic construct
TDKTSGSPHSKAQNQQ

SEQ ID NO: 2299 - protein, 16 aa, synthetic construct
TFKGSGSPHSKAPNQQ

SEQ ID NO: 2300 - protein, 16 aa, synthetic construct
TVNGSGSPHSKAQNQL

SEQ ID NO: 2301 - protein, 16 aa, synthetic construct
TINGSGSPHSKRPEQQ

SEQ ID NO: 2302 - protein, 16 aa, synthetic construct
TINGSGSPHSKAQRTM

SEQ ID NO: 2303 - protein, 16 aa, synthetic construct
TEKASGSPHSKAQNQQ

SEQ ID NO: 2304 - protein, 16 aa, synthetic construct
SDQGSGSPHSKAQNQQ

SEQ ID NO: 2305 - protein, 16 aa, synthetic construct
TEITSGSPHSKAQNQQ

SEQ ID NO: 2306 - protein, 16 aa, synthetic construct
TDKSSGSPHSKAQNQQ

SEQ ID NO: 2307 - protein, 16 aa, synthetic construct
TIDGSGSPHSKAQNQQ

SEQ ID NO: 2308 - protein, 16 aa, synthetic construct
TVNGNGSPHSKAQNQH

SEQ ID NO: 2309 - protein, 16 aa, synthetic construct
NTNGSGSPHSKAQNQQ

SEQ ID NO: 2310 - protein, 16 aa, synthetic construct
TETHSGSPHSKAQNQQ

SEQ ID NO: 2311 - protein, 16 aa, synthetic construct
TINGGGSPHSKALNQQ

SEQ ID NO: 2312 - protein, 16 aa, synthetic construct
TINGSGSPHSKALHQH

SEQ ID NO: 2313 - protein, 16 aa, synthetic construct
TINGTGSPHSKAQNHQ

SEQ ID NO: 2314 - protein, 16 aa, synthetic construct
TINGSGSPHSKAQHRI

SEQ ID NO: 2315 - protein, 16 aa, synthetic construct
TINGSGSPHSKAQYIH

SEQ ID NO: 2316 - protein, 16 aa, synthetic construct
TENISGSPHSKAQNQQ

SEQ ID NO: 2317 - protein, 16 aa, synthetic construct
TIIGGGSPHSKAHNQQ

SEQ ID NO: 2318 - protein, 16 aa, synthetic construct
TINGSGSPHSKAQKFE

SEQ ID NO: 2319 - protein, 16 aa, synthetic construct
TSNESGSPHSKAQNHQ

SEQ ID NO: 2320 - protein, 16 aa, synthetic construct
TINGSGSPHSKAQFPS

SEQ ID NO: 2321 - protein, 16 aa, synthetic construct
TERPSGSPHSKAQNQQ

SEQ ID NO: 2322 - protein, 16 aa, synthetic construct
TINGNGSPHSKAQNPL

SEQ ID NO: 2323 - protein, 16 aa, synthetic construct
SIKGNGSPHSKAQNQQ

SEQ ID NO: 2324 - protein, 16 aa, synthetic construct
TERMSGSPHSKAQNQQ

SEQ ID NO: 2325 - protein, 16 aa, synthetic construct
TERSSGSPHSKAQNQQ

SEQ ID NO: 2326 - protein, 16 aa, synthetic construct
TELHSGSPHSKAQNQQ

SEQ ID NO: 2327 - protein, 16 aa, synthetic construct
TELTSGSPHSKAQNQQ

SEQ ID NO: 2328 - protein, 16 aa, synthetic construct
TINGSGSPHSKAHNQQ

SEQ ID NO: 2329 - protein, 16 aa, synthetic construct
TINGGGSPHSKAQSQQ

SEQ ID NO: 2330 - protein, 16 aa, synthetic construct
TINGSGSPHSKAQAIK

SEQ ID NO: 2331 - protein, 16 aa, synthetic construct
TENTSGSPHSKAQNQQ

SEQ ID NO: 2332 - protein, 16 aa, synthetic construct
TIDGSGSPHSKGQNRQ

SEQ ID NO: 2333 - protein, 16 aa, synthetic construct
NINGSGSPHSKAQSQQ

SEQ ID NO: 2334 - protein, 16 aa, synthetic construct
TINGSVSPHGKAQNQL

SEQ ID NO: 2335 - protein, 16 aa, synthetic construct
TSNASGSPHSKAQNQL

SEQ ID NO: 2336 - protein, 16 aa, synthetic construct
TEARSGSPHSKAQNQQ

SEQ ID NO: 2337 - protein, 16 aa, synthetic construct
TEKNSGSPHSKAQNQQ

SEQ ID NO: 2338 - protein, 16 aa, synthetic construct
TANGSGSPHSKAQYQQ

SEQ ID NO: 2339 - protein, 16 aa, synthetic construct
TVNGSGSPHSKAQYQH

SEQ ID NO: 2340 - protein, 16 aa, synthetic construct
TINGSGSPHTKAQNPQ

SEQ ID NO: 2341 - protein, 16 aa, synthetic construct
TINGSGSPHSKGQNPP

SEQ ID NO: 2342 - protein, 16 aa, synthetic construct
TIIGSGSPHSKAQHQL

SEQ ID NO: 2343 - protein, 16 aa, synthetic construct
TINGSGSPHSKAQSPP

SEQ ID NO: 2344 - protein, 16 aa, synthetic construct
TIYGSGSPHSKAQNQQ

SEQ ID NO: 2345 - protein, 16 aa, synthetic construct
TINGSGSPHSKAQAKL

SEQ ID NO: 2346 - protein, 16 aa, synthetic construct
TDKNSGSPHSKAQNQQ

SEQ ID NO: 2347 - protein, 16 aa, synthetic construct
TINGSGSPHSKTKSQQ

SEQ ID NO: 2348 - protein, 16 aa, synthetic construct
TINGSGSPHSKAQDRP

SEQ ID NO: 2349 - protein, 16 aa, synthetic construct
TINGIGSPHSKAQNLG

SEQ ID NO: 2350 - protein, 16 aa, synthetic construct
TINGSGSPHSKAQSQQ

SEQ ID NO: 2351 - protein, 16 aa, synthetic construct
TENLSGSPHSKAQNQQ

SEQ ID NO: 2352 - protein, 16 aa, synthetic construct
TINGSGSPHSKAQAFH

SEQ ID NO: 2353 - protein, 16 aa, synthetic construct
TINGSGSPHSKAQKQQ

SEQ ID NO: 2354 - protein, 16 aa, synthetic construct
TFSGSGSPHSKAQNLQ

SEQ ID NO: 2355 - protein, 16 aa, synthetic construct
AINGSGSPHSKAQNAQ

SEQ ID NO: 2356 - protein, 16 aa, synthetic construct
TESWSGSPHSKAQNQQ

SEQ ID NO: 2357 - protein, 16 aa, synthetic construct
TTNGSGSPHSKAHNQL

SEQ ID NO: 2358 - protein, 16 aa, synthetic construct
TVNGNGSPHSKAQNHQ

SEQ ID NO: 2359 - protein, 16 aa, synthetic construct
TEDKSGSPHSKAQNQQ

SEQ ID NO: 2360 - protein, 16 aa, synthetic construct
TESASGSPHSKAQNQQ

SEQ ID NO: 2361 - protein, 16 aa, synthetic construct
TNNGSGSPHSKAQNQQ

SEQ ID NO: 2362 - protein, 16 aa, synthetic construct
TSNGGGSPHSKAQNLQ

SEQ ID NO: 2363 - protein, 16 aa, synthetic construct
TDKMSGSPHSKAQNQQ

SEQ ID NO: 2364 - protein, 16 aa, synthetic construct
EVHGSGSPHSKAQNQQ

SEQ ID NO: 2365 - protein, 16 aa, synthetic construct
TINGSGSPHSKAQKLN

SEQ ID NO: 2366 - protein, 16 aa, synthetic construct
TINGGGSPHSKSQNQH

SEQ ID NO: 2367 - protein, 16 aa, synthetic construct
TVNGGGSPHSKAQSQQ

SEQ ID NO: 2368 - protein, 16 aa, synthetic construct
TTNGSGSPHSKAQYQH

SEQ ID NO: 2369 - protein, 16 aa, synthetic construct
TISGSGSPHSKAQYQH

SEQ ID NO: 2370 - protein, 16 aa, synthetic construct
TESTSGSPHSKAQNQQ

SEQ ID NO: 2371 - protein, 16 aa, synthetic construct
TINGSGSPHSKSQNVQ

SEQ ID NO: 2372 - protein, 16 aa, synthetic construct
SINGSGSPHSKAQAQQ

SEQ ID NO: 2373 - protein, 16 aa, synthetic construct
TVNGSGSPHSKAQNLQ

SEQ ID NO: 2374 - protein, 16 aa, synthetic construct
TVRDSGSPHSKAQNQQ

SEQ ID NO: 2375 - protein, 16 aa, synthetic construct
TFNASGSPHSKAPNQQ

SEQ ID NO: 2376 - protein, 16 aa, synthetic construct
TDRMSGSPHSKAQNQQ

SEQ ID NO: 2377 - protein, 16 aa, synthetic construct
TINGSGSPHSKAQTPP

SEQ ID NO: 2378 - protein, 16 aa, synthetic construct
TIKGSGSPHSKAQNQQ

SEQ ID NO: 2379 - protein, 16 aa, synthetic construct
NHIGSGSPHSKAQNQQ

SEQ ID NO: 2380 - protein, 16 aa, synthetic construct
TINGSGSPHSKAQYQH

SEQ ID NO: 2381 - protein, 16 aa, synthetic construct
TIPIDGSPHSKAQNQQ

SEQ ID NO: 2382 - protein, 16 aa, synthetic construct
TINGSGSPHSKAQGQQ

SEQ ID NO: 2383 - protein, 16 aa, synthetic construct
TFNGSGSPHNKAQNHQ

SEQ ID NO: 2384 - protein, 16 aa, synthetic construct
ESDGSGSPHSKAQNQQ

SEQ ID NO: 2385 - protein, 16 aa, synthetic construct
TINGSGSPHSKAQPPA

SEQ ID NO: 2386 - protein, 16 aa, synthetic construct
TINGSGSPHSKAQERP

SEQ ID NO: 2387 - protein, 16 aa, synthetic construct
TIKGSGSPHSKAQDLQ

SEQ ID NO: 2388 - protein, 16 aa, synthetic construct
TDLKSGSPHSKAQNQQ

SEQ ID NO: 2389 - protein, 16 aa, synthetic construct
TINGGGSPHSKAQNPP

SEQ ID NO: 2390 - protein, 16 aa, synthetic construct
TINGSGSPHSKAQAMH

SEQ ID NO: 2391 - protein, 16 aa, synthetic construct
TVPNSGSPHSKAQNQQ

SEQ ID NO: 2392 - protein, 16 aa, synthetic construct
TVIGSGSPHSKALNQQ

SEQ ID NO: 2393 - protein, 16 aa, synthetic construct
TINGSGSPHSKAQHPS

SEQ ID NO: 2394 - protein, 16 aa, synthetic construct
TINGLGSPHSKSQNQQ

SEQ ID NO: 2395 - protein, 16 aa, synthetic construct
TINGTGSPHSKAQNQQ

SEQ ID NO: 2396 - protein, 16 aa, synthetic construct
TINGSGSPHSKAPGLQ

SEQ ID NO: 2397 - protein, 16 aa, synthetic construct
TINGSGSPHSKAQGIR

SEQ ID NO: 2398 - protein, 16 aa, synthetic construct
TESHSGSPHSKAQNQQ

SEQ ID NO: 2399 - protein, 16 aa, synthetic construct
TINGSGSPHSKAQAPA

SEQ ID NO: 2400 - protein, 16 aa, synthetic construct
TINGSGSPHSKSQSQQ

SEQ ID NO: 2401 - protein, 16 aa, synthetic construct
AEHGSGSPHSKAQNQQ

SEQ ID NO: 2402 - protein, 16 aa, synthetic construct
TEDRSGSPHSKAQNQQ

SEQ ID NO: 2403 - protein, 16 aa, synthetic construct
NCLGSGSPHSKAQNQQ

SEQ ID NO: 2404 - protein, 16 aa, synthetic construct
TDRGSGSPHSKAQNQQ

SEQ ID NO: 2405 - protein, 16 aa, synthetic construct
TINGSGSPHSKAQIPP

SEQ ID NO: 2406 - protein, 16 aa, synthetic construct
TVKGSGSPHSKAQDQQ

SEQ ID NO: 2407 - protein, 16 aa, synthetic construct
NADGSGSPHSKAQNQQ

SEQ ID NO: 2408 - protein, 16 aa, synthetic construct
TDKVSGSPHSKAQNQQ

SEQ ID NO: 2409 - protein, 16 aa, synthetic construct
TITGSGSPHSKAQTQL

SEQ ID NO: 2410 - protein, 16 aa, synthetic construct
TINGSGSPHSKAQAPS

SEQ ID NO: 2411 - protein, 16 aa, synthetic construct
NCVGSGSPHSKAQNQQ

SEQ ID NO: 2412 - protein, 16 aa, synthetic construct
TIRDAGSPHSKAQNQQ

SEQ ID NO: 2413 - protein, 16 aa, synthetic construct
TVKDSGSPHSKAQNQQ

SEQ ID NO: 2414 - protein, 16 aa, synthetic construct
NALGSGSPHSKAQNQQ

SEQ ID NO: 2415 - protein, 16 aa, synthetic construct
VINGSGSPHSKGQNQQ

SEQ ID NO: 2416 - protein, 16 aa, synthetic construct
TVNGGGSPHSKAQNQQ

SEQ ID NO: 2417 - protein, 16 aa, synthetic construct
TIQDGGSPHSKAQNQQ

SEQ ID NO: 2418 - protein, 16 aa, synthetic construct
TISGGGSPHSKAQNQQ

SEQ ID NO: 2419 - protein, 16 aa, synthetic construct
TSNASGSPHSKAHNQQ

SEQ ID NO: 2420 - protein, 16 aa, synthetic construct
TINGSGSPHSKAQNTY

SEQ ID NO: 2421 - protein, 16 aa, synthetic construct
TINGSGSPHSKSQNQH

SEQ ID NO: 2422 - protein, 16 aa, synthetic construct
TINGGGSPHSKAQDKQ

SEQ ID NO: 2423 - protein, 16 aa, synthetic construct
TEFVSGSPHSKAQNQQ

SEQ ID NO: 2424 - protein, 16 aa, synthetic construct
TVNGSGSPHSKAQNHL

SEQ ID NO: 2425 - protein, 16 aa, synthetic construct
TREISGSPHSKAQNQQ

SEQ ID NO: 2426 - protein, 16 aa, synthetic construct
TINGSGSPHSKAQIGM

SEQ ID NO: 2427 - protein, 16 aa, synthetic construct
TIDGSGSPHSKALNKQ

SEQ ID NO: 2428 - protein, 16 aa, synthetic construct
TIIGGGSPHSKAQNPQ

SEQ ID NO: 2429 - protein, 16 aa, synthetic construct
QGEGSGSPHSKAQNQQ

SEQ ID NO: 2430 - protein, 16 aa, synthetic construct
TINGTGSPHSKAPNQL

SEQ ID NO: 2431 - protein, 16 aa, synthetic construct
TVNGSGSPHSKAQLQQ

SEQ ID NO: 2432 - protein, 16 aa, synthetic construct
TFNGGGSPHSKAQYQQ

SEQ ID NO: 2433 - protein, 16 aa, synthetic construct
SINGSGSPHSKTQSQQ

SEQ ID NO: 2434 - protein, 16 aa, synthetic construct
TVNGGGSPHSKAQHQQ

SEQ ID NO: 2435 - protein, 16 aa, synthetic construct
SEKGSGSPHSKAQNQQ

SEQ ID NO: 2436 - protein, 16 aa, synthetic construct
NVNGSGSPHSKAQNQQ

SEQ ID NO: 2437 - protein, 16 aa, synthetic construct
GGEGSGSPHSKAQNQQ

SEQ ID NO: 2438 - protein, 16 aa, synthetic construct
TINGSGSPHSKAQRMS

SEQ ID NO: 2439 - protein, 16 aa, synthetic construct
TINGSGSPHSKAQGIL

SEQ ID NO: 2440 - protein, 16 aa, synthetic construct
EFVGSGSPHSKAQNQQ

SEQ ID NO: 2441 - protein, 16 aa, synthetic construct
TIIGSGSPHSKAQDRQ

SEQ ID NO: 2442 - protein, 16 aa, synthetic construct
SDKGSGSPHSKAQNQQ

SEQ ID NO: 2443 - protein, 16 aa, synthetic construct
TEQVSGSPHSKAQNQQ

SEQ ID NO: 2444 - protein, 16 aa, synthetic construct
TEHVSGSPHSKAQNQQ

SEQ ID NO: 2445 - protein, 16 aa, synthetic construct
TINGSGSPHSKARDWQ

SEQ ID NO: 2446 - protein, 16 aa, synthetic construct
TENASGSPHSKAQNQQ

SEQ ID NO: 2447 - protein, 16 aa, synthetic construct
EVQGSGSPHSKAQNQQ

SEQ ID NO: 2448 - protein, 16 aa, synthetic construct
TINGSGSPHSKAQNTH

SEQ ID NO: 2449 - protein, 16 aa, synthetic construct
TINGSGSPHSKAPNLQ

SEQ ID NO: 2450 - protein, 16 aa, synthetic construct
TINGSGSPHSKAQERS

SEQ ID NO: 2451 - protein, 16 aa, synthetic construct
TSNGSGSPHSKAQNYQ

SEQ ID NO: 2452 - protein, 16 aa, synthetic construct
TEYISGSPHSKAQNQQ

SEQ ID NO: 2453 - protein, 16 aa, synthetic construct
TINGSGSPHSKAQRTC

SEQ ID NO: 2454 - protein, 16 aa, synthetic construct
TINGSGSPHSKAQIGH

SEQ ID NO: 2455 - protein, 16 aa, synthetic construct
NCWGSGSPHSKAQNQQ

SEQ ID NO: 2456 - protein, 16 aa, synthetic construct
TINGSGSPHSKAQGAI

SEQ ID NO: 2457 - protein, 16 aa, synthetic construct
TDVNSGSPHSKAQNQQ

SEQ ID NO: 2458 - protein, 16 aa, synthetic construct
SDIGSGSPHSKAQNQQ

SEQ ID NO: 2459 - protein, 16 aa, synthetic construct
TINGSGSPHSKAQVPP

SEQ ID NO: 2460 - protein, 16 aa, synthetic construct
TINGSGSPHSKAQVQQ

SEQ ID NO: 2461 - protein, 16 aa, synthetic construct
TINGSGSPHSKALMRQ

SEQ ID NO: 2462 - protein, 16 aa, synthetic construct
TINGSGSPHSKAQYSV

SEQ ID NO: 2463 - protein, 16 aa, synthetic construct
NSIGSGSPHSKAQNQQ

SEQ ID NO: 2464 - protein, 16 aa, synthetic construct
TINGSGSPHSKVPNLQ

SEQ ID NO: 2465 - protein, 16 aa, synthetic construct
AINGSGSPHSKAQSQQ

SEQ ID NO: 2466 - protein, 16 aa, synthetic construct
TINGSGSPHSKAQAIT

SEQ ID NO: 2467 - protein, 16 aa, synthetic construct
TINGSGSPHSKAQKTL

SEQ ID NO: 2468 - protein, 16 aa, synthetic construct
TVNGSGSPHSKAQNQW

SEQ ID NO: 2469 - protein, 16 aa, synthetic construct
TINGSGSPHSKAQLHH

SEQ ID NO: 2470 - protein, 16 aa, synthetic construct
TEQTSGSPHSKAQNQQ

SEQ ID NO: 2471 - protein, 16 aa, synthetic construct
TINGSGSPHSKAQNII

SEQ ID NO: 2472 - protein, 16 aa, synthetic construct
NSLGSGSPHSKAQNQQ

SEQ ID NO: 2473 - protein, 16 aa, synthetic construct
TIPMEGSPHSKAQNQQ

SEQ ID NO: 2474 - protein, 16 aa, synthetic construct
TINGSGSPHSKAQGHH

SEQ ID NO: 2475 - protein, 16 aa, synthetic construct
TDRTSGSPHSKAQNQQ

SEQ ID NO: 2476 - protein, 16 aa, synthetic construct
TINGSGSPHSKAQSKV

SEQ ID NO: 2477 - protein, 16 aa, synthetic construct
EVVGSGSPHSKAQNQQ

SEQ ID NO: 2478 - protein, 16 aa, synthetic construct
TINGSGSPHSKAQLPS

SEQ ID NO: 2479 - protein, 16 aa, synthetic construct
TINGSGSPHSKAIGKQ

SEQ ID NO: 2480 - protein, 16 aa, synthetic construct
TEPTSGSPHSKAQNQQ

SEQ ID NO: 2481 - protein, 16 aa, synthetic construct
TVNGGGSPHSKSQNQQ

SEQ ID NO: 2482 - protein, 16 aa, synthetic construct
TINGSGSPHSKAQAIH

SEQ ID NO: 2483 - protein, 16 aa, synthetic construct
TINGSGSPHSKAQHGL

SEQ ID NO: 2484 - protein, 16 aa, synthetic construct
SELGSGSPHSKAQNQQ

SEQ ID NO: 2485 - protein, 16 aa, synthetic construct
TINGSGSPHSKAQFMC

SEQ ID NO: 2486 - protein, 16 aa, synthetic construct
TINVSGSPHSKAQGQQ

SEQ ID NO: 2487 - protein, 16 aa, synthetic construct
TINGGGSPHSKAQNQM

SEQ ID NO: 2488 - protein, 16 aa, synthetic construct
TVNGSGSPHSKAQHLQ

SEQ ID NO: 2489 - protein, 16 aa, synthetic construct
TIRENGSPHSKAQNQQ

SEQ ID NO: 2490 - protein, 16 aa, synthetic construct
TINGSGSPHSKTQNHQ

SEQ ID NO: 2491 - protein, 16 aa, synthetic construct
TINGSGSPHSKAQPAR

SEQ ID NO: 2492 - protein, 16 aa, synthetic construct
TVNGSGSPHSKAQSLQ

SEQ ID NO: 2493 - protein, 16 aa, synthetic construct
TINGSGSPHSKSQSQL

SEQ ID NO: 2494 - protein, 16 aa, synthetic construct
TINGSASPHSKAHSQQ

SEQ ID NO: 2495 - protein, 16 aa, synthetic construct
TWQNSGSPHSKAQNQQ

SEQ ID NO: 2496 - protein, 16 aa, synthetic construct
TINGSGSPHSKAQDRQ

SEQ ID NO: 2497 - protein, 16 aa, synthetic construct
TINGSGSPHSKAQMPS

SEQ ID NO: 2498 - protein, 16 aa, synthetic construct
TNNGGGSPHSKAQNLQ

SEQ ID NO: 2499 - protein, 16 aa, synthetic construct
TINGSGSPHSKAQGSL

SEQ ID NO: 2500 - protein, 16 aa, synthetic construct
TEVTSGSPHSKAQNQQ

SEQ ID NO: 2501 - protein, 16 aa, synthetic construct
SINGGGSPHSKAQYQQ

SEQ ID NO: 2502 - protein, 16 aa, synthetic construct
TVIGSGSPHSKSQNQQ

SEQ ID NO: 2503 - protein, 16 aa, synthetic construct
AVNVSGSPHSKAQNQQ

SEQ ID NO: 2504 - protein, 16 aa, synthetic construct
TVNGNGSPHSKSQNQQ

SEQ ID NO: 2505 - protein, 16 aa, synthetic construct
TDRNSGSPHSKAQNQQ

SEQ ID NO: 2506 - protein, 16 aa, synthetic construct
TINGSGSPHSKAQVPA

SEQ ID NO: 2507 - protein, 16 aa, synthetic construct
GVLGSGSPHSKAQNQQ

SEQ ID NO: 2508 - protein, 16 aa, synthetic construct
TLNGNGSPHSKAQNLQ

SEQ ID NO: 2509 - protein, 16 aa, synthetic construct
AINGSGSPHSKAQDKQ

SEQ ID NO: 2510 - protein, 16 aa, synthetic construct
TSNGSGSPHSKAHYQQ

SEQ ID NO: 2511 - protein, 16 aa, synthetic construct
TINGSGSPHSKAQVPS

SEQ ID NO: 2512 - protein, 16 aa, synthetic construct
TELRSGSPHSKAQNQQ

SEQ ID NO: 2513 - protein, 16 aa, synthetic construct
NINGSGSPHSKAQNHQ

SEQ ID NO: 2514 - protein, 16 aa, synthetic construct
TVNGGGSPHSKAQNHQ

SEQ ID NO: 2515 - protein, 16 aa, synthetic construct
TINGSGSPHSKARGEQ

SEQ ID NO: 2516 - protein, 16 aa, synthetic construct
TINGGGSPHSKAQYQH

SEQ ID NO: 2517 - protein, 16 aa, synthetic construct
TEDLSGSPHSKAQNQQ

SEQ ID NO: 2518 - protein, 16 aa, synthetic construct
TINGSGSPHSKAPGQQ

SEQ ID NO: 2519 - protein, 16 aa, synthetic construct
TIPKNGSPHSKAQNQQ

SEQ ID NO: 2520 - protein, 16 aa, synthetic construct
TINGSGSPHSKAQSLQ

SEQ ID NO: 2521 - protein, 16 aa, synthetic construct
TINGSGSPHSKRLEQQ

SEQ ID NO: 2522 - protein, 16 aa, synthetic construct
TERGSGSPHSKAQNQQ

SEQ ID NO: 2523 - protein, 16 aa, synthetic construct
TVNGSGSPHSKAPNQQ

SEQ ID NO: 2524 - protein, 16 aa, synthetic construct
TSNGSGSPHSKAQNQS

SEQ ID NO: 2525 - protein, 16 aa, synthetic construct
TINGSGSPHSKAQKVI

SEQ ID NO: 2526 - protein, 16 aa, synthetic construct
TEGISGSPHSKAQNQQ

SEQ ID NO: 2527 - protein, 16 aa, synthetic construct
TINGSGSPHSKAQNND

SEQ ID NO: 2528 - protein, 16 aa, synthetic construct
TINGSGSPHSKAQSVH

SEQ ID NO: 2529 - protein, 16 aa, synthetic construct
TINGSGSPHSKAQPLG

SEQ ID NO: 2530 - protein, 16 aa, synthetic construct
TINKEGSPHSKAQNQQ

SEQ ID NO: 2531 - protein, 16 aa, synthetic construct
TCNASGSPHSKAQNQQ

SEQ ID NO: 2532 - protein, 16 aa, synthetic construct
AINGSGSPHSKAHNQE

SEQ ID NO: 2533 - protein, 16 aa, synthetic construct
TEGLSGSPHSKAQNQQ

SEQ ID NO: 2534 - protein, 16 aa, synthetic construct
TRDASGSPHSKAQNQQ

SEQ ID NO: 2535 - protein, 16 aa, synthetic construct
TSNGSGSPHSKAQNLQ

SEQ ID NO: 2536 - protein, 16 aa, synthetic construct
TGNGSGSPHSKAQIQQ

SEQ ID NO: 2537 - protein, 16 aa, synthetic construct
TVNGGGSPHSKAQNLQ

SEQ ID NO: 2538 - protein, 16 aa, synthetic construct
TDRSSGSPHSKAQNQQ

SEQ ID NO: 2539 - protein, 16 aa, synthetic construct
TINGSGSPHSKAQVRN

SEQ ID NO: 2540 - protein, 16 aa, synthetic construct
TINGSGSPHSKAPSNQ

SEQ ID NO: 2541 - protein, 16 aa, synthetic construct
TINGSGSPHSKAQVGH

SEQ ID NO: 2542 - protein, 16 aa, synthetic construct
NAIGSGSPHSKAQNQQ

SEQ ID NO: 2543 - protein, 16 aa, synthetic construct
AENGSGSPHSKAQNQQ

SEQ ID NO: 2544 - protein, 16 aa, synthetic construct
TINGSGSPHSKAQRDI

SEQ ID NO: 2545 - protein, 16 aa, synthetic construct
TINGSGSPHSKAQMPN

SEQ ID NO: 2546 - protein, 16 aa, synthetic construct
TVNGSGSPHSKSQNQQ

SEQ ID NO: 2547 - protein, 16 aa, synthetic construct
TIPAIGSPHSKAQNQQ

SEQ ID NO: 2548 - protein, 16 aa, synthetic construct
TINGSGSPHSKARGLQ

SEQ ID NO: 2549 - protein, 16 aa, synthetic construct
TELGSGSPHSKAQNQQ

SEQ ID NO: 2550 - protein, 16 aa, synthetic construct
AETGSGSPHSKAQNQQ

SEQ ID NO: 2551 - protein, 16 aa, synthetic construct
TINGSGSPHSKLQKQQ

SEQ ID NO: 2552 - protein, 16 aa, synthetic construct
TINGSGSPHSKAPSLQ

SEQ ID NO: 2553 - protein, 16 aa, synthetic construct
TINGSGSPHSKAQRDQ

SEQ ID NO: 2554 - protein, 16 aa, synthetic construct
TDVGSGSPHSKAQNQQ

SEQ ID NO: 2555 - protein, 16 aa, synthetic construct
TINGSGSPHSKNRDQQ

SEQ ID NO: 2556 - protein, 16 aa, synthetic construct
SINGSGSPHSKAPNLQ

SEQ ID NO: 2557 - protein, 16 aa, synthetic construct
TINGSGSPHSKAQAKG

SEQ ID NO: 2558 - protein, 16 aa, synthetic construct
TVNGSGSPHSKAQDKQ

SEQ ID NO: 2559 - protein, 16 aa, synthetic construct
TINGGGSPHSKAQNPQ

SEQ ID NO: 2560 - protein, 16 aa, synthetic construct
TINGSGSPHSKAQSAH

SEQ ID NO: 2561 - protein, 16 aa, synthetic construct
TINGNGSPHSKSQNQH

SEQ ID NO: 2562 - protein, 16 aa, synthetic construct
TVPTSGSPHSKAQNQQ

SEQ ID NO: 2563 - protein, 16 aa, synthetic construct
TIDGSGSPHSKSQNHQ

SEQ ID NO: 2564 - protein, 16 aa, synthetic construct
TDVKSGSPHSKAQNQQ

SEQ ID NO: 2565 - protein, 16 aa, synthetic construct
AINRSGSPHSKAQDQQ

SEQ ID NO: 2566 - protein, 16 aa, synthetic construct
TINGSGSPHSKAQSTM

SEQ ID NO: 2567 - protein, 16 aa, synthetic construct
TVNASGSPHSKAQNQL

SEQ ID NO: 2568 - protein, 16 aa, synthetic construct
TINGSGSPHSKAQREM

SEQ ID NO: 2569 - protein, 16 aa, synthetic construct
TVHGSGSPHSKAQSQQ

SEQ ID NO: 2570 - protein, 16 aa, synthetic construct
TINGGGSPHSKSQNRQ

SEQ ID NO: 2571 - protein, 16 aa, synthetic construct
TINGSGSPHSKAQYRA

SEQ ID NO: 2572 - protein, 16 aa, synthetic construct
TINGGGSPHSKAQRQQ

SEQ ID NO: 2573 - protein, 16 aa, synthetic construct
TEPMSGSPHSKAQNQQ

SEQ ID NO: 2574 - protein, 16 aa, synthetic construct
TINGSGSPHSKNQWQQ

SEQ ID NO: 2575 - protein, 16 aa, synthetic construct
ETAGSGSPHSKAQNQQ

SEQ ID NO: 2576 - protein, 16 aa, synthetic construct
TINGSGSPHSKAQRMN

SEQ ID NO: 2577 - protein, 16 aa, synthetic construct
NNLGSGSPHSKAQNQQ

SEQ ID NO: 2578 - protein, 16 aa, synthetic construct
TINGSGSPHAKAQNHQ

SEQ ID NO: 2579 - protein, 16 aa, synthetic construct
TIIKNGSPHSKAQNQQ

SEQ ID NO: 2580 - protein, 16 aa, synthetic construct
TINGSGSPHSKAGDSQ

SEQ ID NO: 2581 - protein, 16 aa, synthetic construct
TINGSGSPHSKLKSQQ

SEQ ID NO: 2582 - protein, 16 aa, synthetic construct
TINGSGSPHSKAQKIS

SEQ ID NO: 2583 - protein, 16 aa, synthetic construct
TEYNSGSPHSKAQNQQ

SEQ ID NO: 2584 - protein, 16 aa, synthetic construct
TINGSGSPHSKAPSMQ

SEQ ID NO: 2585 - protein, 16 aa, synthetic construct
AINGSGSPHSKAQNQQ

SEQ ID NO: 2586 - protein, 16 aa, synthetic construct
TINGSGSPHSKASPRQ

SEQ ID NO: 2587 - protein, 16 aa, synthetic construct
TINGSGSPHSKRMEQQ

SEQ ID NO: 2588 - protein, 16 aa, synthetic construct
TINGSGSPHSKAQYQN

SEQ ID NO: 2589 - protein, 16 aa, synthetic construct
TINGSGSPHSKAQYYV

SEQ ID NO: 2590 - protein, 16 aa, synthetic construct
TINGSGSPHSKLRRQQ

SEQ ID NO: 2591 - protein, 16 aa, synthetic construct
TINGSGSPHSKAGCGQ

SEQ ID NO: 2592 - protein, 16 aa, synthetic construct
SMNGSGSPHSRAQNQQ

SEQ ID NO: 2593 - protein, 16 aa, synthetic construct
TINGSGSPHSKRLRQQ

SEQ ID NO: 2594 - protein, 16 aa, synthetic construct
TINGSGSPHSLRRNQQ

SEQ ID NO: 2595 - protein, 16 aa, synthetic construct
TINGSGSPHSRGRNQQ

SEQ ID NO: 2596 - protein, 16 aa, synthetic construct
TINGSGSPHSSRRNQQ

SEQ ID NO: 2597 - protein, 16 aa, synthetic construct
TINGSGSPHSKAFRLQ

SEQ ID NO: 2598 - protein, 16 aa, synthetic construct
TINGSCSPHRKAQNQQ

SEQ ID NO: 2599 - protein, 16 aa, synthetic construct
TINGSGSPHFLRQNQQ

SEQ ID NO: 2600 - protein, 16 aa, synthetic construct
TINGSGSPHSLRFNQQ

SEQ ID NO: 2601 - protein, 16 aa, synthetic construct
TINGSGSPHSKWLLQQ

SEQ ID NO: 2602 - protein, 16 aa, synthetic construct
TINGSGSPHSKRRLQQ

SEQ ID NO: 2603 - protein, 16 aa, synthetic construct
TINGSGSPHSKAQRKL

SEQ ID NO: 2604 - protein, 16 aa, synthetic construct
TINGSGSPHSKALRRQ

SEQ ID NO: 2605 - protein, 16 aa, synthetic construct
TINGSGSPHSKAQRLR

SEQ ID NO: 2606 - protein, 16 aa, synthetic construct
YLSGSGSPHSKAQNQQ

SEQ ID NO: 2607 - protein, 16 aa, synthetic construct
TINGSGSPHSKAQRRL

SEQ ID NO: 2608 - protein, 16 aa, synthetic construct
TINGSGSPHSKARRQQ

SEQ ID NO: 2609 - protein, 16 aa, synthetic construct
TINGSGSPHSKARRLQ

SEQ ID NO: 2610 - protein, 16 aa, synthetic construct
TINGSGSPHSKSRRQQ

SEQ ID NO: 2611 - protein, 16 aa, synthetic construct
TINGLLSPHWKAQNQQ

SEQ ID NO: 2612 - protein, 16 aa, synthetic construct
TINGSGSPHSKARLRQ

SEQ ID NO: 2613 - protein, 16 aa, synthetic construct
TINGSGSPHSKASKRQ

SEQ ID NO: 2614 - protein, 16 aa, synthetic construct
TINGSGSPHVRRQNQQ

SEQ ID NO: 2615 - protein, 16 aa, synthetic construct
TINGSGSPHSKAQLYR

SEQ ID NO: 2616 - protein, 16 aa, synthetic construct
GLSGSGSPHSKAQNQQ

SEQ ID NO: 2617 - protein, 16 aa, synthetic construct
TINGSGSPHSKAQLTV

SEQ ID NO: 2618 - protein, 16 aa, synthetic construct
TINGHDSPHKRGQHRQ

SEQ ID NO: 2619 - protein, 16 aa, synthetic construct
MPEGHDSPHKSGQNQQ

SEQ ID NO: 2620 - protein, 16 aa, synthetic construct
MEGGHDSPHKSGQNQQ

SEQ ID NO: 2621 - protein, 16 aa, synthetic construct
MEYGHDSPHKSGQNQQ

SEQ ID NO: 2622 - protein, 16 aa, synthetic construct
AEWGHDSPHKSGQNQQ

SEQ ID NO: 2623 - protein, 16 aa, synthetic construct
CEWGHDSPHKSGQNQQ

SEQ ID NO: 2624 - protein, 16 aa, synthetic construct
ANNGQDSPHKSGQNQQ

SEQ ID NO: 2625 - protein, 16 aa, synthetic construct
IPEGHDSPHKSGQNQQ

SEQ ID NO: 2626 - protein, 16 aa, synthetic construct
ADMGHDSPHKSGQNQQ

SEQ ID NO: 2627 - protein, 16 aa, synthetic construct
IEYGHDSPHKSGQNQQ

SEQ ID NO: 2628 - protein, 16 aa, synthetic construct
ADYGHDSPHKSGQNQQ

SEQ ID NO: 2629 - protein, 16 aa, synthetic construct
IETGHDSPHKSGQNQQ

SEQ ID NO: 2630 - protein, 16 aa, synthetic construct
MEWGHDSPHKSGQNQQ

SEQ ID NO: 2631 - protein, 16 aa, synthetic construct
CEYGHDSPHKSGQNQQ

SEQ ID NO: 2632 - protein, 16 aa, synthetic construct
RINGHDSPHKSGQKQQ

SEQ ID NO: 2633 - protein, 16 aa, synthetic construct
MEIGHDSPHKSGQNQQ

SEQ ID NO: 2634 - protein, 16 aa, synthetic construct
LEYGHDSPHKSGQNQQ

SEQ ID NO: 2635 - protein, 16 aa, synthetic construct
ADWGHDSPHKSGQNQQ

SEQ ID NO: 2636 - protein, 16 aa, synthetic construct
IEIGHDSPHKSGQNQQ

SEQ ID NO: 2637 - protein, 16 aa, synthetic construct
DIMGHDSPHKSGQNQQ

SEQ ID NO: 2638 - protein, 16 aa, synthetic construct
FEQGHDSPHKSGQNQQ

SEQ ID NO: 2639 - protein, 16 aa, synthetic construct
MEFGHDSPHKSGQNQQ

SEQ ID NO: 2640 - protein, 16 aa, synthetic construct
CDQGHDSPHKSGQNQQ

SEQ ID NO: 2641 - protein, 16 aa, synthetic construct
LPEGHDSPHKSGQNQQ

SEQ ID NO: 2642 - protein, 16 aa, synthetic construct
IENGHDSPHKSGQNQQ

SEQ ID NO: 2643 - protein, 16 aa, synthetic construct
MESGHDSPHKSGQNQQ

SEQ ID NO: 2644 - protein, 16 aa, synthetic construct
AEIGHDSPHKSGQNQQ

SEQ ID NO: 2645 - protein, 16 aa, synthetic construct
VEYGHDSPHKSGQNQQ

SEQ ID NO: 2646 - protein, 16 aa, synthetic construct
IINGHDSPHKSGLTQQ

SEQ ID NO: 2647 - protein, 16 aa, synthetic construct
TSNGDDSPHKSGRNQQ

SEQ ID NO: 2648 - protein, 16 aa, synthetic construct
IEVGHDSPHKSGQNQQ

SEQ ID NO: 2649 - protein, 16 aa, synthetic construct
MEMGHDSPHKSGQNQQ

SEQ ID NO: 2650 - protein, 16 aa, synthetic construct
AEVGHDSPHKSGQNQQ

SEQ ID NO: 2651 - protein, 16 aa, synthetic construct
MDAGHDSPHKSGQNQQ

SEQ ID NO: 2652 - protein, 16 aa, synthetic construct
VEWGHDSPHKSGQNQQ

SEQ ID NO: 2653 - protein, 16 aa, synthetic construct
AEQGHDSPHKSGQNQQ

SEQ ID NO: 2654 - protein, 16 aa, synthetic construct
LEWGHDSPHKSGQNQQ

SEQ ID NO: 2655 - protein, 16 aa, synthetic construct
MELGHDSPHKSGQNQQ

SEQ ID NO: 2656 - protein, 16 aa, synthetic construct
METGHDSPHKSGQNQQ

SEQ ID NO: 2657 - protein, 16 aa, synthetic construct
MEAGHDSPHKSGQNQQ

SEQ ID NO: 2658 - protein, 16 aa, synthetic construct
IESGHDSPHKSGQNQQ

SEQ ID NO: 2659 - protein, 16 aa, synthetic construct
MEVGHDSPHKSGQNQQ

SEQ ID NO: 2660 - protein, 16 aa, synthetic construct
CEIGHDSPHKSGQNQQ

SEQ ID NO: 2661 - protein, 16 aa, synthetic construct
ATNGHDSPHKSGLNQQ

SEQ ID NO: 2662 - protein, 16 aa, synthetic construct
MDGGHDSPHKSGQNQQ

SEQ ID NO: 2663 - protein, 16 aa, synthetic construct
QEVGHDSPHKSGQNQQ

SEQ ID NO: 2664 - protein, 16 aa, synthetic construct
ADQGHDSPHKSGQNQQ

SEQ ID NO: 2665 - protein, 16 aa, synthetic construct
TINGHESPHKSAQNHQ

SEQ ID NO: 2666 - protein, 16 aa, synthetic construct
TINGHDSPHKSAQNQW

SEQ ID NO: 2667 - protein, 16 aa, synthetic construct
NMNGHDSPHKSGQNTH

SEQ ID NO: 2668 - protein, 16 aa, synthetic construct
IEMGHDSPHKSGQNQQ

SEQ ID NO: 2669 - protein, 16 aa, synthetic construct
TINGHDSPHKSGRRRQ

SEQ ID NO: 2670 - protein, 16 aa, synthetic construct
ISNGHDSPHKSAQNQQ

SEQ ID NO: 2671 - protein, 16 aa, synthetic construct
TGNGHDSPHKSGQYQQ

SEQ ID NO: 2672 - protein, 16 aa, synthetic construct
TINGNYSPHKIGQNQQ

SEQ ID NO: 2673 - protein, 16 aa, synthetic construct
TINGHDSPHKSRQNDQ

SEQ ID NO: 2674 - protein, 16 aa, synthetic construct
QQQGHDSPHKSGQNQQ

SEQ ID NO: 2675 - protein, 16 aa, synthetic construct
HDWGHDSPHKSGQNQQ

SEQ ID NO: 2676 - protein, 16 aa, synthetic construct
IEGGHDSPHKSGQNQQ

SEQ ID NO: 2677 - protein, 16 aa, synthetic construct
TFNRSGSPHSKAQNQQ

SEQ ID NO: 2678 - protein, 16 aa, synthetic construct
AINGHDSPHKSGQIRQ

SEQ ID NO: 2679 - protein, 16 aa, synthetic construct
TINGHDSPHKIGQNQH

SEQ ID NO: 2680 - protein, 16 aa, synthetic construct
AINGYDSPHKSGQKQQ

SEQ ID NO: 2681 - protein, 16 aa, synthetic construct
TESGHDSPHKSGQNQQ

SEQ ID NO: 2682 - protein, 16 aa, synthetic construct
TINGHDSPHKSGQSVQ

SEQ ID NO: 2683 - protein, 16 aa, synthetic construct
TINGHESPHKSGRSQQ

SEQ ID NO: 2684 - protein, 16 aa, synthetic construct
TINGHDSPHKSGQNKL

SEQ ID NO: 2685 - protein, 16 aa, synthetic construct
TINGHDSPHKTGQNQQ

SEQ ID NO: 2686 - protein, 16 aa, synthetic construct
TINGRGSPHKRGQNQQ

SEQ ID NO: 2687 - protein, 16 aa, synthetic construct
TINGSGSPHTKAQNPP

SEQ ID NO: 2688 - protein, 16 aa, synthetic construct
TINGQDSPHKSGQHQQ

SEQ ID NO: 2689 - protein, 16 aa, synthetic construct
SINGHDSPHKSGQIQH

SEQ ID NO: 2690 - protein, 16 aa, synthetic construct
AINGHDSPHKSGPRQQ

SEQ ID NO: 2691 - protein, 16 aa, synthetic construct
TVNGHDSPHKSGHTQQ

SEQ ID NO: 2692 - protein, 16 aa, synthetic construct
SINGHDSPHKSGQRQH

SEQ ID NO: 2693 - protein, 16 aa, synthetic construct
SLNGSGSPHTKAQNQQ

SEQ ID NO: 2694 - protein, 16 aa, synthetic construct
AINGHDSPHKSAQSQQ

SEQ ID NO: 2695 - protein, 16 aa, synthetic construct
SIYGHESPHKSGQNQQ

SEQ ID NO: 2696 - protein, 16 aa, synthetic construct
TVNGHDSPHKSLQNQQ

SEQ ID NO: 2697 - protein, 16 aa, synthetic construct
TINGHGSPHSKAQNPQ

SEQ ID NO: 2698 - protein, 16 aa, synthetic construct
TSNGYDSPHKSGQKQQ

SEQ ID NO: 2699 - protein, 16 aa, synthetic construct
TVNGHDSPHKSGRNQE

SEQ ID NO: 2700 - protein, 16 aa, synthetic construct
TTNGHDSPHKSGQTQL

SEQ ID NO: 2701 - protein, 16 aa, synthetic construct
AINGHDSPHKSEKNQQ

SEQ ID NO: 2702 - protein, 16 aa, synthetic construct
IINGRDSPHKSGQDQQ

SEQ ID NO: 2703 - protein, 16 aa, synthetic construct
TISGHDSPHKTGHNQQ

SEQ ID NO: 2704 - protein, 16 aa, synthetic construct
SINGYDSPHKSGQTQQ

SEQ ID NO: 2705 - protein, 16 aa, synthetic construct
TINGHESPHKSGQTQQ

SEQ ID NO: 2706 - protein, 16 aa, synthetic construct
TINGHDSPHKSGQSKQ

SEQ ID NO: 2707 - protein, 16 aa, synthetic construct
AIIGHESPHKSGQNQQ

SEQ ID NO: 2708 - protein, 16 aa, synthetic construct
TINGHDSPHKTGQNQP

SEQ ID NO: 2709 - protein, 16 aa, synthetic construct
AINGHDSPHKSGQSPQ

SEQ ID NO: 2710 - protein, 16 aa, synthetic construct
TIKGNDSPHKSVQNQQ

SEQ ID NO: 2711 - protein, 16 aa, synthetic construct
TEFGHDSPHKSGQNQQ

SEQ ID NO: 2712 - protein, 16 aa, synthetic construct
TINGHDSPHKSAQNYQ

SEQ ID NO: 2713 - protein, 16 aa, synthetic construct
TFNGSASPHSKALNQQ

SEQ ID NO: 2714 - protein, 16 aa, synthetic construct
TINGHESPHKSAQNRQ

SEQ ID NO: 2715 - protein, 16 aa, synthetic construct
TTNGHDSPHKSGQNQQ

SEQ ID NO: 2716 - protein, 16 aa, synthetic construct
TIKGQDSPHKIGQNQQ

SEQ ID NO: 2717 - protein, 16 aa, synthetic construct
TVNGHDSPHKSGQNHL

SEQ ID NO: 2718 - protein, 16 aa, synthetic construct
SINGHDSPHKSGQYQH

SEQ ID NO: 2719 - protein, 16 aa, synthetic construct
TINGNDSPHKSVQNHQ

SEQ ID NO: 2720 - protein, 16 aa, synthetic construct
TITGHDSPHKSGQNQW

SEQ ID NO: 2721 - protein, 16 aa, synthetic construct
TNNGHDSPHKSVQNQH

SEQ ID NO: 2722 - protein, 16 aa, synthetic construct
TIDGHDSPHKSGQNQH

SEQ ID NO: 2723 - protein, 16 aa, synthetic construct
TVNGHDSPHKSGQTRQ

SEQ ID NO: 2724 - protein, 16 aa, synthetic construct
TVNGHDSPHKSGQNLH

SEQ ID NO: 2725 - protein, 16 aa, synthetic construct
AISGHDSPHKSGLNQQ

SEQ ID NO: 2726 - protein, 16 aa, synthetic construct
AINGHDSPHKSAQNQE

SEQ ID NO: 2727 - protein, 16 aa, synthetic construct
TITGHDSPHKSGQHLQ

SEQ ID NO: 2728 - protein, 16 aa, synthetic construct
TINGHDSPHKSRLNQP

SEQ ID NO: 2729 - protein, 16 aa, synthetic construct
TVDGHDSPHKSGQKQQ

SEQ ID NO: 2730 - protein, 16 aa, synthetic construct
TINGQDSPHKSGQNQD

SEQ ID NO: 2731 - protein, 16 aa, synthetic construct
TIEGHDSPHKSGRNQQ

SEQ ID NO: 2732 - protein, 16 aa, synthetic construct
TTNGHDSPHKSGQNLL

SEQ ID NO: 2733 - protein, 16 aa, synthetic construct
TINGHDSPHKSGQLVI

SEQ ID NO: 2734 - protein, 16 aa, synthetic construct
TVNGHDSPHKSRQSQQ

SEQ ID NO: 2735 - protein, 16 aa, synthetic construct
TINGHDSPHKSGRTQE

SEQ ID NO: 2736 - protein, 16 aa, synthetic construct
TINGHDSPHKSVQTHQ

SEQ ID NO: 2737 - protein, 16 aa, synthetic construct
TSNGHDSPHKSGQNQP

SEQ ID NO: 2738 - protein, 16 aa, synthetic construct
VINGHDSPHKSGQTQQ

SEQ ID NO: 2739 - protein, 16 aa, synthetic construct
TINGPDSPHKIGQNQQ

SEQ ID NO: 2740 - protein, 16 aa, synthetic construct
AVNGHDSPHKSVQNQQ

SEQ ID NO: 2741 - protein, 16 aa, synthetic construct
TINGHDSPHKSRQDQH

SEQ ID NO: 2742 - protein, 16 aa, synthetic construct
AINGPDSPHKSGQKQQ

SEQ ID NO: 2743 - protein, 16 aa, synthetic construct
TINGHDSPHKSRQSQH

SEQ ID NO: 2744 - protein, 16 aa, synthetic construct
TIYGHDSPHKSVQNQL

SEQ ID NO: 2745 - protein, 16 aa, synthetic construct
TVNGHDSPHKSGQNLL

SEQ ID NO: 2746 - protein, 16 aa, synthetic construct
TENKSGSPHSKAQNQQ

SEQ ID NO: 2747 - protein, 16 aa, synthetic construct
TTNGQDSPHKSGQNQQ

SEQ ID NO: 2748 - protein, 16 aa, synthetic construct
TDKGSGSPHSKAQNQQ

SEQ ID NO: 2749 - protein, 16 aa, synthetic construct
TIDGHDSPHKSGRNQQ

SEQ ID NO: 2750 - protein, 16 aa, synthetic construct
TINGYDSPHKSGQYQH

SEQ ID NO: 2751 - protein, 16 aa, synthetic construct
TDNGHDSPHKSRQNQQ

SEQ ID NO: 2752 - protein, 16 aa, synthetic construct
TINGHDSPHKSWVRQQ

SEQ ID NO: 2753 - protein, 16 aa, synthetic construct
TINGHESPHKSGQNQH

SEQ ID NO: 2754 - protein, 16 aa, synthetic construct
TVNGHDSPHKIGHNQQ

SEQ ID NO: 2755 - protein, 16 aa, synthetic construct
TCNGHDSPHKSGRNQQ

SEQ ID NO: 2756 - protein, 16 aa, synthetic construct
TINGNGSPHSKAQNHQ

SEQ ID NO: 2757 - protein, 16 aa, synthetic construct
NVVGHDSPHKSGQNQQ

SEQ ID NO: 2758 - protein, 16 aa, synthetic construct
TINGHDSPHKSNAWQQ

SEQ ID NO: 2759 - protein, 16 aa, synthetic construct
TDAGHDSPHKSGQNQQ

SEQ ID NO: 2760 - protein, 16 aa, synthetic construct
TEVGHDSPHKSGQNQQ

SEQ ID NO: 2761 - protein, 16 aa, synthetic construct
SELGHDSPHKSGQNQQ

SEQ ID NO: 2762 - protein, 16 aa, synthetic construct
TINGHDSPHKSGQSVP

SEQ ID NO: 2763 - protein, 16 aa, synthetic construct
TINGHESPHKSGQNIQ

SEQ ID NO: 2764 - protein, 16 aa, synthetic construct
TINGHDSPHKSVQNHL

SEQ ID NO: 2765 - protein, 16 aa, synthetic construct
TINGHDSPHKIGLDQQ

SEQ ID NO: 2766 - protein, 16 aa, synthetic construct
TSNASGSPHSKAQHQQ

SEQ ID NO: 2767 - protein, 16 aa, synthetic construct
TINGHDSPHKRGPDQQ

SEQ ID NO: 2768 - protein, 16 aa, synthetic construct
TINGMGSPHSKTQNQQ

SEQ ID NO: 2769 - protein, 16 aa, synthetic construct
TIKGHDSPHKSGESQQ

SEQ ID NO: 2770 - protein, 16 aa, synthetic construct
TINGHDSPHKHGQNHQ

SEQ ID NO: 2771 - protein, 16 aa, synthetic construct
TVNGTGSPHSKAQNQL

SEQ ID NO: 2772 - protein, 16 aa, synthetic construct
TIIGHDSPHKSGQYQH

SEQ ID NO: 2773 - protein, 16 aa, synthetic construct
TSNGHDSPHKSVQNKQ

SEQ ID NO: 2774 - protein, 16 aa, synthetic construct
IVNGQVSPHKSGQNQQ

SEQ ID NO: 2775 - protein, 16 aa, synthetic construct
TVNGHDSPHKSGQRQL

SEQ ID NO: 2776 - protein, 16 aa, synthetic construct
TVNGHDSPHKIGQNQL

SEQ ID NO: 2777 - protein, 16 aa, synthetic construct
TINGHDSPHKSGQIIV

SEQ ID NO: 2778 - protein, 16 aa, synthetic construct
IGNGHESPHKSGQNQQ

SEQ ID NO: 2779 - protein, 16 aa, synthetic construct
EVMGHDSPHKSGQNQQ

SEQ ID NO: 2780 - protein, 16 aa, synthetic construct
TINGYDSPHKSGQKQS

SEQ ID NO: 2781 - protein, 16 aa, synthetic construct
TIHGNGSPHSKAQNQE

SEQ ID NO: 2782 - protein, 16 aa, synthetic construct
YQVGHDSPHKSGQNQQ

SEQ ID NO: 2783 - protein, 16 aa, synthetic construct
TIKGDDSPHKSVQNQQ

SEQ ID NO: 2784 - protein, 16 aa, synthetic construct
TINGHDSPHKSVQSHQ

SEQ ID NO: 2785 - protein, 16 aa, synthetic construct
TINGHDSPHKSGQFVV

SEQ ID NO: 2786 - protein, 16 aa, synthetic construct
TVNGHDSPHKSRQNLQ

SEQ ID NO: 2787 - protein, 16 aa, synthetic construct
ATNGHNSPHKSGQNQE

SEQ ID NO: 2788 - protein, 16 aa, synthetic construct
AINGHDSPHKSAQNQQ

SEQ ID NO: 2789 - protein, 16 aa, synthetic construct
TEHGHDSPHKSGQNQQ

SEQ ID NO: 2790 - protein, 16 aa, synthetic construct
TIYGHDSPHKSGQSQP

SEQ ID NO: 2791 - protein, 16 aa, synthetic construct
TISGHESPHKSGQNEQ

SEQ ID NO: 2792 - protein, 16 aa, synthetic construct
AIIGHDSPHKSAQNQQ

SEQ ID NO: 2793 - protein, 16 aa, synthetic construct
AIDGHDSPHKSGQNQL

SEQ ID NO: 2794 - protein, 16 aa, synthetic construct
TIMGHDSPHKSVQNQQ

SEQ ID NO: 2795 - protein, 16 aa, synthetic construct
EVGGHDSPHKSGQNQQ

SEQ ID NO: 2796 - protein, 16 aa, synthetic construct
TINGHDSPHKSAQNLL

SEQ ID NO: 2797 - protein, 16 aa, synthetic construct
TINASGSPHSKAINQQ

SEQ ID NO: 2798 - protein, 16 aa, synthetic construct
AINGNGSPHKRGQNQQ

SEQ ID NO: 2799 - protein, 16 aa, synthetic construct
SEMGHDSPHKSGQNQQ

SEQ ID NO: 2800 - protein, 16 aa, synthetic construct
AQQGHDSPHKSGQNQQ

SEQ ID NO: 2801 - protein, 16 aa, synthetic construct
AINGHDSPHKSGQSLQ

SEQ ID NO: 2802 - protein, 16 aa, synthetic construct
TINGSGSPHSKAPNQQ

SEQ ID NO: 2803 - protein, 16 aa, synthetic construct
CGEGHDSPHKSGQNQQ

SEQ ID NO: 2804 - protein, 16 aa, synthetic construct
TVNGHDSPHKSAQNHQ

SEQ ID NO: 2805 - protein, 16 aa, synthetic construct
TVNGHDSPHKSGQTQL

SEQ ID NO: 2806 - protein, 16 aa, synthetic construct
TNNGHDSPHKSGRNRQ

SEQ ID NO: 2807 - protein, 16 aa, synthetic construct
TINGHDSPHKYGQNEQ

SEQ ID NO: 2808 - protein, 16 aa, synthetic construct
TINGNGSPHSKAPNLQ

SEQ ID NO: 2809 - protein, 16 aa, synthetic construct
SINGHDSPHKSQQNQQ

SEQ ID NO: 2810 - protein, 16 aa, synthetic construct
TIGGHDSPHKSGQNQQ

SEQ ID NO: 2811 - protein, 16 aa, synthetic construct
TINGHDSPHKSVQSKQ

SEQ ID NO: 2812 - protein, 16 aa, synthetic construct
ELVGHDSPHKSGQNQQ

SEQ ID NO: 2813 - protein, 16 aa, synthetic construct
ELMGHDSPHKSGQNQQ

SEQ ID NO: 2814 - protein, 16 aa, synthetic construct
TINGNDSPHKIGHNQQ

SEQ ID NO: 2815 - protein, 16 aa, synthetic construct
TIKGGGSPHSKAQDQQ

SEQ ID NO: 2816 - protein, 16 aa, synthetic construct
TVNGHDSPHKSGQTQQ

SEQ ID NO: 2817 - protein, 16 aa, synthetic construct
TINGQDSPHKSGQNPL

SEQ ID NO: 2818 - protein, 16 aa, synthetic construct
TVNASGSPHSKAQNHQ

SEQ ID NO: 2819 - protein, 16 aa, synthetic construct
TINGHDSPHKSGRDQK

SEQ ID NO: 2820 - protein, 16 aa, synthetic construct
TINGHDSPHKSVHNQQ

SEQ ID NO: 2821 - protein, 16 aa, synthetic construct
TINGHDSPHKSGQWKR

SEQ ID NO: 2822 - protein, 16 aa, synthetic construct
TIDGSGSPHSKAENRQ

SEQ ID NO: 2823 - protein, 16 aa, synthetic construct
NEIGHDSPHKSGQNQQ

SEQ ID NO: 2824 - protein, 16 aa, synthetic construct
AINGHDSPHKSGQSQQ

SEQ ID NO: 2825 - protein, 16 aa, synthetic construct
IINGHDSPHKSRQAQQ

SEQ ID NO: 2826 - protein, 16 aa, synthetic construct
TPNGHDSPHKSGQNQQ

SEQ ID NO: 2827 - protein, 16 aa, synthetic construct
ITNGHDSPHKSGQTQQ

SEQ ID NO: 2828 - protein, 16 aa, synthetic construct
TINGHDSPHKSVQNHQ

SEQ ID NO: 2829 - protein, 16 aa, synthetic construct
TINGHDSPHKSKQNQQ

SEQ ID NO: 2830 - protein, 16 aa, synthetic construct
TINGHDSPHKSAQNQL

SEQ ID NO: 2831 - protein, 16 aa, synthetic construct
TVNGHDSPHKSGQTQP

SEQ ID NO: 2832 - protein, 16 aa, synthetic construct
TDQGHDSPHKSGQNQQ

SEQ ID NO: 2833 - protein, 16 aa, synthetic construct
TINGHDSPHKLWINQQ

SEQ ID NO: 2834 - protein, 16 aa, synthetic construct
GINGPDSPHKSGQNQQ

SEQ ID NO: 2835 - protein, 16 aa, synthetic construct
SEIGHDSPHKSGQNQQ

SEQ ID NO: 2836 - protein, 16 aa, synthetic construct
TINGHDSPHKSVQKQL

SEQ ID NO: 2837 - protein, 16 aa, synthetic construct
TINGHPSPHWKGQNQQ

SEQ ID NO: 2838 - protein, 16 aa, synthetic construct
TVNGHDSPHKSGRNQL

SEQ ID NO: 2839 - protein, 16 aa, synthetic construct
TIKGSGSPHSKVQDQQ

SEQ ID NO: 2840 - protein, 16 aa, synthetic construct
SEKGHDSPHKSGQNQQ

SEQ ID NO: 2841 - protein, 16 aa, synthetic construct
WSAGHDSPHKSGQNQQ

SEQ ID NO: 2842 - protein, 16 aa, synthetic construct
ELAGHDSPHKSGQNQQ

SEQ ID NO: 2843 - protein, 16 aa, synthetic construct
TINGHDSPHKMGRNQQ

SEQ ID NO: 2844 - protein, 16 aa, synthetic construct
TINGHDSPHKSGISIQ

SEQ ID NO: 2845 - protein, 16 aa, synthetic construct
TSNGHDSPHKSVQNLQ

SEQ ID NO: 2846 - protein, 16 aa, synthetic construct
QTQGHDSPHKSGQNQQ

SEQ ID NO: 2847 - protein, 16 aa, synthetic construct
TINGHDSPHKMAHNQQ

SEQ ID NO: 2848 - protein, 16 aa, synthetic construct
AINGSGSPHSKAQTQQ

SEQ ID NO: 2849 - protein, 16 aa, synthetic construct
TINGHDSPHKHGQNQQ

SEQ ID NO: 2850 - protein, 16 aa, synthetic construct
GADGHDSPHKSGQNQQ

SEQ ID NO: 2851 - protein, 16 aa, synthetic construct
VGEGHDSPHKSGQNQQ

SEQ ID NO: 2852 - protein, 16 aa, synthetic construct
ANEGHDSPHKSGQNQQ

SEQ ID NO: 2853 - protein, 16 aa, synthetic construct
TEAKSGSPHSKAQNQQ

SEQ ID NO: 2854 - protein, 16 aa, synthetic construct
TINGHDSPHKSVQSQQ

SEQ ID NO: 2855 - protein, 16 aa, synthetic construct
TIPGSGSPHSKAQNLQ

SEQ ID NO: 2856 - protein, 16 aa, synthetic construct
TINGHDSPHKSGQTVC

SEQ ID NO: 2857 - protein, 16 aa, synthetic construct
ELRGHDSPHKSGQNQQ

SEQ ID NO: 2858 - protein, 16 aa, synthetic construct
CQIGHDSPHKSGQNQQ

SEQ ID NO: 2859 - protein, 16 aa, synthetic construct
GVMGHDSPHKSGQNQQ

SEQ ID NO: 2860 - protein, 16 aa, synthetic construct
ACDGHDSPHKSGQNQQ

SEQ ID NO: 2861 - protein, 16 aa, synthetic construct
TINGQDSPHKSGQYQQ

SEQ ID NO: 2862 - protein, 16 aa, synthetic construct
TINGHDSPHKSGQQIM

SEQ ID NO: 2863 - protein, 16 aa, synthetic construct
TINGHDSPHKSRQNEQ

SEQ ID NO: 2864 - protein, 16 aa, synthetic construct
ASNGHDSPHKSGLNHQ

SEQ ID NO: 2865 - protein, 16 aa, synthetic construct
TVNGHDSPHKSGQSQP

SEQ ID NO: 2866 - protein, 16 aa, synthetic construct
NELGHDSPHKSGQNQQ

SEQ ID NO: 2867 - protein, 16 aa, synthetic construct
AAEGHDSPHKSGQNQQ

SEQ ID NO: 2868 - protein, 16 aa, synthetic construct
GQNGHDSPHKSGQNQQ

SEQ ID NO: 2869 - protein, 16 aa, synthetic construct
NEFGHDSPHKSGQNQQ

SEQ ID NO: 2870 - protein, 16 aa, synthetic construct
TSIGYDSPHKSGQNQQ

SEQ ID NO: 2871 - protein, 16 aa, synthetic construct
TDNGHDSPHKSGQNLQ

SEQ ID NO: 2872 - protein, 16 aa, synthetic construct
TITGHDSPHKSRQDQQ

SEQ ID NO: 2873 - protein, 16 aa, synthetic construct
AEHGHDSPHKSGQNQQ

SEQ ID NO: 2874 - protein, 16 aa, synthetic construct
TINGDDSPHKSGQKQL

SEQ ID NO: 2875 - protein, 16 aa, synthetic construct
EILGHDSPHKSGQNQQ

SEQ ID NO: 2876 - protein, 16 aa, synthetic construct
TIHGSGSPHSKAQNQA

SEQ ID NO: 2877 - protein, 16 aa, synthetic construct
AINGDDSPHKSGHNQQ

SEQ ID NO: 2878 - protein, 16 aa, synthetic construct
TSNGHNSPHKSGQNQE

SEQ ID NO: 2879 - protein, 16 aa, synthetic construct
TINGHDSPHKSGQMIH

SEQ ID NO: 2880 - protein, 16 aa, synthetic construct
NAIGHDSPHKSGQNQQ

SEQ ID NO: 2881 - protein, 16 aa, synthetic construct
VINGHDSPHKSGRNHQ

SEQ ID NO: 2882 - protein, 16 aa, synthetic construct
TITGHDSPHKSVQNRQ

SEQ ID NO: 2883 - protein, 16 aa, synthetic construct
TINGHDSPHKSGQKMN

SEQ ID NO: 2884 - protein, 16 aa, synthetic construct
TIHGHDSPHKSGQSQQ

SEQ ID NO: 2885 - protein, 16 aa, synthetic construct
TEIGHDSPHKSGQNQQ

SEQ ID NO: 2886 - protein, 16 aa, synthetic construct
TINGHDSPHKSGQYQH

SEQ ID NO: 2887 - protein, 14 aa, synthetic construct
GSGSPHSKAQNRHT

SEQ ID NO: 2888 - protein, 14 aa, synthetic construct
GSGSPHSKVQNQQT

SEQ ID NO: 2889 - protein, 14 aa, synthetic construct
MSGSPHSKAQNQQT

SEQ ID NO: 2890 - protein, 14 aa, synthetic construct
GSGSPHSKARDQQT

SEQ ID NO: 2891 - protein, 14 aa, synthetic construct
GSGSPHSKAPNLQT

SEQ ID NO: 2892 - protein, 14 aa, synthetic construct
TSGSPHSKAQNQQT

SEQ ID NO: 2893 - protein, 14 aa, synthetic construct
GSGSPHSKAHVRQT

SEQ ID NO: 2894 - protein, 14 aa, synthetic construct
GSGSPHSKAPNQHT

SEQ ID NO: 2895 - protein, 14 aa, synthetic construct
ISGSPHSKAQNQQT

SEQ ID NO: 2896 - protein, 14 aa, synthetic construct
GSGSPHSKTQSQQT

SEQ ID NO: 2897 - skipped

SEQ ID NO: 2898 - protein, 14 aa, synthetic construct
ESGSPHSKAQNQQI

SEQ ID NO: 2899 - protein, 14 aa, synthetic construct
GSGSPHSKAQPAKT

SEQ ID NO: 2900 - protein, 14 aa, synthetic construct
SSGSPHSKAQNQQT

SEQ ID NO: 2901 - protein, 14 aa, synthetic construct
GSGSPHSKSQTQQN

SEQ ID NO: 2902 - protein, 14 aa, synthetic construct
ASGSPHSKAQNQQT

SEQ ID NO: 2903 - protein, 14 aa, synthetic construct
GSGSPHSKAQNLAT

SEQ ID NO: 2904 - protein, 14 aa, synthetic construct
GSGSPHSKSQNQLT

SEQ ID NO: 2905 - protein, 14 aa, synthetic construct
NSGSPHSKAQNQQT

SEQ ID NO: 2906 - protein, 14 aa, synthetic construct
GSGSPHSKAQGQQT

SEQ ID NO: 2907 - protein, 14 aa, synthetic construct
VSGSPHSKAQNQQT

SEQ ID NO: 2908 - protein, 14 aa, synthetic construct
GSGSPHSKALNRQS

SEQ ID NO: 2909 - protein, 14 aa, synthetic construct
LSGSPHSKAQNQQT

SEQ ID NO: 2910 - protein, 14 aa, synthetic construct
GSGSPHSKAHNQQT

SEQ ID NO: 2911 - protein, 14 aa, synthetic construct
GSGSPHSKTQNQQT

SEQ ID NO: 2912 - protein, 14 aa, synthetic construct
GSGSPHSKAQNPPT

SEQ ID NO: 2913 - protein, 14 aa, synthetic construct
GSGSPHSKAQNLQT

SEQ ID NO: 2914 - protein, 14 aa, synthetic construct
GSGSPHSKAQYQQT

SEQ ID NO: 2915 - protein, 14 aa, synthetic construct
GSGSPHSKAQDQET

SEQ ID NO: 2916 - protein, 14 aa, synthetic construct
KSGSPHSKAQNQQT

SEQ ID NO: 2917 - protein, 14 aa, synthetic construct
GSGSPHSKAQNHQT

SEQ ID NO: 2918 - protein, 14 aa, synthetic construct
GSGSPHSKAQDQQT

SEQ ID NO: 2919 - protein, 14 aa, synthetic construct
GSGSPHSKGHWQQT

SEQ ID NO: 2920 - protein, 14 aa, synthetic construct
GSGSPHSKAPNQQT

SEQ ID NO: 2921 - protein, 14 aa, synthetic construct
GSGSPHSKAQNQLI

SEQ ID NO: 2922 - protein, 14 aa, synthetic construct
GSGSPHSKRPEQQT

SEQ ID NO: 2923 - protein, 14 aa, synthetic construct
GSGSPHSKAQRTMT

SEQ ID NO: 2924 - protein, 14 aa, synthetic construct
GSGSPHSKAQNQQH

SEQ ID NO: 2925 - protein, 14 aa, synthetic construct
HSGSPHSKAQNQQT

SEQ ID NO: 2926 - protein, 14 aa, synthetic construct
GSGSPHSKALHQHT

SEQ ID NO: 2927 - protein, 14 aa, synthetic construct
GSGSPHSKAQHRIT

SEQ ID NO: 2928 - protein, 14 aa, synthetic construct
GSGSPHSKAQYIHT

SEQ ID NO: 2929 - protein, 14 aa, synthetic construct
GSGSPHSKAQKFET

SEQ ID NO: 2930 - protein, 14 aa, synthetic construct
ESGSPHSKAQNHQT

SEQ ID NO: 2931 - protein, 14 aa, synthetic construct
GSGSPHSKAQFPST

SEQ ID NO: 2932 - protein, 14 aa, synthetic construct
PSGSPHSKAQNQQT

SEQ ID NO: 2933 - protein, 14 aa, synthetic construct
GSGSPHSKAHNQQR

SEQ ID NO: 2934 - protein, 14 aa, synthetic construct
GSGSPHSKAQAIKT

SEQ ID NO: 2935 - protein, 14 aa, synthetic construct
GSGSPHSKGQNRQT

SEQ ID NO: 2936 - protein, 14 aa, synthetic construct
GSGSPHSKAQSQQT

SEQ ID NO: 2937 - protein, 14 aa, synthetic construct
ASGSPHSKAQNQLT

SEQ ID NO: 2938 - protein, 14 aa, synthetic construct
RSGSPHSKAQNQQT

SEQ ID NO: 2939 - protein, 14 aa, synthetic construct
GSGSPHSKAQYQHT

SEQ ID NO: 2940 - protein, 14 aa, synthetic construct
GSGSPHTKAQNPQS

SEQ ID NO: 2941 - protein, 14 aa, synthetic construct
GSGSPHSKGQNPPT

SEQ ID NO: 2942 - protein, 14 aa, synthetic construct
GSGSPHSKAQHQLT

SEQ ID NO: 2943 - protein, 14 aa, synthetic construct
GSGSPHSKAQSPPT

SEQ ID NO: 2944 - protein, 14 aa, synthetic construct
GSGSPHSKAQAKLT

SEQ ID NO: 2945 - protein, 14 aa, synthetic construct
GSGSPHSKTKSQQT

SEQ ID NO: 2946 - protein, 14 aa, synthetic construct
GSGSPHSKAQDRPT

SEQ ID NO: 2947 - protein, 14 aa, synthetic construct
GSGSPHSKAQSQQL

SEQ ID NO: 2948 - protein, 14 aa, synthetic construct
GSGSPHSKAQAFHT

SEQ ID NO: 2949 - protein, 14 aa, synthetic construct
GSGSPHSKAQKQQD

SEQ ID NO: 2950 - protein, 14 aa, synthetic construct
GSGSPHSKAQNAQT

SEQ ID NO: 2951 - protein, 14 aa, synthetic construct
WSGSPHSKAQNQQT

SEQ ID NO: 2952 - protein, 14 aa, synthetic construct
GSGSPHSKAHNQLT

SEQ ID NO: 2953 - protein, 14 aa, synthetic construct
GSGSPHSKAQNQQY

SEQ ID NO: 2954 - protein, 14 aa, synthetic construct
GSGSPHSKAQKLNT

SEQ ID NO: 2955 - protein, 14 aa, synthetic construct
GSGSPHSKSQNVQT

SEQ ID NO: 2956 - protein, 14 aa, synthetic construct
GSGSPHSKAQAQQT

SEQ ID NO: 2957 - protein, 14 aa, synthetic construct
GSGSPHSKAQNLQA

SEQ ID NO: 2958 - protein, 14 aa, synthetic construct
DSGSPHSKAQNQQT

SEQ ID NO: 2959 - protein, 14 aa, synthetic construct
ASGSPHSKAPNQQT

SEQ ID NO: 2960 - protein, 14 aa, synthetic construct
GSGSPHSKAQTPPT

SEQ ID NO: 2961 - protein, 14 aa, synthetic construct
GSGSPHSKAQYQHA

SEQ ID NO: 2962 - protein, 14 aa, synthetic construct
GSGSPHSKAQGQQA

SEQ ID NO: 2963 - protein, 14 aa, synthetic construct
GSGSPHNKAQNHQT

SEQ ID NO: 2964 - protein, 14 aa, synthetic construct
GSGSPHSKAQPPAT

SEQ ID NO: 2965 - protein, 14 aa, synthetic construct
GSGSPHSKAQERPT

SEQ ID NO: 2966 - protein, 14 aa, synthetic construct
GSGSPHSKAQDLQT

SEQ ID NO: 2967 - protein, 14 aa, synthetic construct
GSGSPHSKAQAMHT

SEQ ID NO: 2968 - protein, 14 aa, synthetic construct
GSGSPHSKALNQQT

SEQ ID NO: 2969 - protein, 14 aa, synthetic construct
GSGSPHSKAQHPST

SEQ ID NO: 2970 - protein, 14 aa, synthetic construct
GSGSPHSKAPGLQT

SEQ ID NO: 2971 - protein, 14 aa, synthetic construct
GSGSPHSKAQGIRT

SEQ ID NO: 2972 - protein, 14 aa, synthetic construct
GSGSPHSKAQAPAT

SEQ ID NO: 2973 - protein, 14 aa, synthetic construct
GSGSPHSKSQSQQI

SEQ ID NO: 2974 - protein, 14 aa, synthetic construct
GSGSPHSKAQIPPT

SEQ ID NO: 2975 - protein, 14 aa, synthetic construct
GSGSPHSKAQTQLT

SEQ ID NO: 2976 - protein, 14 aa, synthetic construct
GSGSPHSKAQAPST

SEQ ID NO: 2977 - protein, 14 aa, synthetic construct
GSGSPHSKGQNQQT

SEQ ID NO: 2978 - protein, 14 aa, synthetic construct
ASGSPHSKAHNQQT

SEQ ID NO: 2979 - protein, 14 aa, synthetic construct
GSGSPHSKAQNTYA

SEQ ID NO: 2980 - protein, 14 aa, synthetic construct
GSGSPHSKSQNQHI

SEQ ID NO: 2981 - protein, 14 aa, synthetic construct
GSGSPHSKAQNHLT

SEQ ID NO: 2982 - protein, 14 aa, synthetic construct
GSGSPHSKAQIGMT

SEQ ID NO: 2983 - protein, 14 aa, synthetic construct
GSGSPHSKALNKQT

SEQ ID NO: 2984 - protein, 14 aa, synthetic construct
GSGSPHSKAQLQQT

SEQ ID NO: 2985 - protein, 14 aa, synthetic construct
GSGSPHSKAQRMST

SEQ ID NO: 2986 - protein, 14 aa, synthetic construct
GSGSPHSKAQGILT

SEQ ID NO: 2987 - protein, 14 aa, synthetic construct
GSGSPHSKAQDRQT

SEQ ID NO: 2988 - protein, 14 aa, synthetic construct
GSGSPHSKARDWQT

SEQ ID NO: 2989 - protein, 14 aa, synthetic construct
GSGSPHSKAQNTHD

SEQ ID NO: 2990 - protein, 14 aa, synthetic construct
GSGSPHSKAPNLQI

SEQ ID NO: 2991 - protein, 14 aa, synthetic construct
GSGSPHSKAQERST

SEQ ID NO: 2992 - protein, 14 aa, synthetic construct
GSGSPHSKAQNYQT

SEQ ID NO: 2993 - protein, 14 aa, synthetic construct
GSGSPHSKAQRTCT

SEQ ID NO: 2994 - protein, 14 aa, synthetic construct
GSGSPHSKAQIGHT

SEQ ID NO: 2995 - protein, 14 aa, synthetic construct
GSGSPHSKAQGAIT

SEQ ID NO: 2996 - protein, 14 aa, synthetic construct
GSGSPHSKAQVPPT

SEQ ID NO: 2997 - protein, 14 aa, synthetic construct
GSGSPHSKAQVQQI

SEQ ID NO: 2998 - protein, 14 aa, synthetic construct
GSGSPHSKALMRQT

SEQ ID NO: 2999 - protein, 14 aa, synthetic construct
GSGSPHSKAQYSVT

SEQ ID NO: 3000 - protein, 14 aa, synthetic construct
GSGSPHSKVPNLQT

SEQ ID NO: 3001 - protein, 14 aa, synthetic construct
GSGSPHSKAQSQQI

SEQ ID NO: 3002 - protein, 14 aa, synthetic construct
GSGSPHSKAQAITT

SEQ ID NO: 3003 - protein, 14 aa, synthetic construct
GSGSPHSKAQKTLT

SEQ ID NO: 3004 - protein, 14 aa, synthetic construct
GSGSPHSKAQNQWT

SEQ ID NO: 3005 - protein, 14 aa, synthetic construct
GSGSPHSKAQLHHT

SEQ ID NO: 3006 - protein, 14 aa, synthetic construct
GSGSPHSKAQNIII

SEQ ID NO: 3007 - protein, 14 aa, synthetic construct
GSGSPHSKAQGHHT

SEQ ID NO: 3008 - protein, 14 aa, synthetic construct
GSGSPHSKAQSKVT

SEQ ID NO: 3009 - protein, 14 aa, synthetic construct
GSGSPHSKAQLPST

SEQ ID NO: 3010 - protein, 14 aa, synthetic construct
GSGSPHSKAIGKQT

SEQ ID NO: 3011 - protein, 14 aa, synthetic construct
GSGSPHSKAQAIHT

SEQ ID NO: 3012 - protein, 14 aa, synthetic construct
GSGSPHSKAQHGLT

SEQ ID NO: 3013 - protein, 14 aa, synthetic construct
GSGSPHSKAQFMCT

SEQ ID NO: 3014 - protein, 14 aa, synthetic construct
VSGSPHSKAQGQQT

SEQ ID NO: 3015 - protein, 14 aa, synthetic construct
GSGSPHSKAQHLQT

SEQ ID NO: 3016 - protein, 14 aa, synthetic construct
GSGSPHSKTQNHQN

SEQ ID NO: 3017 - protein, 14 aa, synthetic construct
GSGSPHSKAQPART

SEQ ID NO: 3018 - protein, 14 aa, synthetic construct
GSGSPHSKAQSLQT

SEQ ID NO: 3019 - protein, 14 aa, synthetic construct
GSGSPHSKSQSQLT

SEQ ID NO: 3020 - protein, 14 aa, synthetic construct
GSGSPHSKAQDRQS

SEQ ID NO: 3021 - protein, 14 aa, synthetic construct
GSGSPHSKAQMPST

SEQ ID NO: 3022 - protein, 14 aa, synthetic construct
GSGSPHSKAQGSLT

SEQ ID NO: 3023 - protein, 14 aa, synthetic construct
GSGSPHSKSQNQQT

SEQ ID NO: 3024 - protein, 14 aa, synthetic construct
GSGSPHSKAQVPAT

SEQ ID NO: 3025 - protein, 14 aa, synthetic construct
GSGSPHSKAQDKQT

SEQ ID NO: 3026 - protein, 14 aa, synthetic construct
GSGSPHSKAHYQQT

SEQ ID NO: 3027 - protein, 14 aa, synthetic construct
GSGSPHSKAQVPST

SEQ ID NO: 3028 - protein, 14 aa, synthetic construct
GSGSPHSKARGEQT

SEQ ID NO: 3029 - protein, 14 aa, synthetic construct
GSGSPHSKAPGQQT

SEQ ID NO: 3030 - protein, 14 aa, synthetic construct
GSGSPHSKAQSLQI

SEQ ID NO: 3031 - protein, 14 aa, synthetic construct
GSGSPHSKRLEQQT

SEQ ID NO: 3032 - protein, 14 aa, synthetic construct
GSGSPHSKAQNQST

SEQ ID NO: 3033 - protein, 14 aa, synthetic construct
GSGSPHSKAQKVIT

SEQ ID NO: 3034 - protein, 14 aa, synthetic construct
GSGSPHSKAQNNDQ

SEQ ID NO: 3035 - protein, 14 aa, synthetic construct
GSGSPHSKAQSVHT

SEQ ID NO: 3036 - protein, 14 aa, synthetic construct
GSGSPHSKAQPLGT

SEQ ID NO: 3037 - protein, 14 aa, synthetic construct
GSGSPHSKAHNQET

SEQ ID NO: 3038 - protein, 14 aa, synthetic construct
GSGSPHSKAQNLQI

SEQ ID NO: 3039 - protein, 14 aa, synthetic construct
GSGSPHSKAQIQQT

SEQ ID NO: 3040 - protein, 14 aa, synthetic construct
GSGSPHSKAQVRNT

SEQ ID NO: 3041 - protein, 14 aa, synthetic construct
GSGSPHSKAPSNQT

SEQ ID NO: 3042 - protein, 14 aa, synthetic construct
GSGSPHSKAQVGHT

SEQ ID NO: 3043 - protein, 14 aa, synthetic construct
GSGSPHSKAQRDIT

SEQ ID NO: 3044 - protein, 14 aa, synthetic construct
GSGSPHSKAQMPNT

SEQ ID NO: 3045 - protein, 14 aa, synthetic construct
GSGSPHSKARGLQT

SEQ ID NO: 3046 - protein, 14 aa, synthetic construct
GSGSPHSKLQKQQT

SEQ ID NO: 3047 - protein, 14 aa, synthetic construct
GSGSPHSKAPSLQT

SEQ ID NO: 3048 - protein, 14 aa, synthetic construct
GSGSPHSKAQRDQT

SEQ ID NO: 3049 - protein, 14 aa, synthetic construct
GSGSPHSKNRDQQT

SEQ ID NO: 3050 - protein, 14 aa, synthetic construct
GSGSPHSKAQAKGT

SEQ ID NO: 3051 - protein, 14 aa, synthetic construct
GSGSPHSKAQSAHT

SEQ ID NO: 3052 - protein, 14 aa, synthetic construct
GSGSPHSKSQNHQT

SEQ ID NO: 3053 - protein, 14 aa, synthetic construct
RSGSPHSKAQDQQT

SEQ ID NO: 3054 - protein, 14 aa, synthetic construct
GSGSPHSKAQSTMT

SEQ ID NO: 3055 - protein, 14 aa, synthetic construct
GSGSPHSKAQREMT

SEQ ID NO: 3056 - protein, 14 aa, synthetic construct
GSGSPHSKAQYRAT

SEQ ID NO: 3057 - protein, 14 aa, synthetic construct
GSGSPHSKNQWQQT

SEQ ID NO: 3058 - protein, 14 aa, synthetic construct
GSGSPHSKAQRMNT

SEQ ID NO: 3059 - protein, 14 aa, synthetic construct
GSGSPHAKAQNHQT

SEQ ID NO: 3060 - protein, 14 aa, synthetic construct
GSGSPHSKAGDSQT

SEQ ID NO: 3061 - protein, 14 aa, synthetic construct
GSGSPHSKLKSQQT

SEQ ID NO: 3062 - protein, 14 aa, synthetic construct
GSGSPHSKAQKIST

SEQ ID NO: 3063 - protein, 14 aa, synthetic construct
GSGSPHSKAPSMQT

SEQ ID NO: 3064 - protein, 14 aa, synthetic construct
GSGSPHSKASPRQT

SEQ ID NO: 3065 - protein, 14 aa, synthetic construct
GSGSPHSKRMEQQT

SEQ ID NO: 3066 - protein, 14 aa, synthetic construct
GSGSPHSKAQYQNT

SEQ ID NO: 3067 - protein, 14 aa, synthetic construct
RSGSPHSKAQNQQI

SEQ ID NO: 3068 - protein, 14 aa, synthetic construct
GSGSPHTKAQNPPT

SEQ ID NO: 3069 - protein, 14 aa, synthetic construct
GSGSPHTKAQNQQT

SEQ ID NO: 3070 - protein, 14 aa, synthetic construct
ASGSPHSKAQHQQT

SEQ ID NO: 3071 - protein, 14 aa, synthetic construct
ASGSPHSKAINQQT

SEQ ID NO: 3072 - protein, 14 aa, synthetic construct
GSGSPHSKAPNQQH

SEQ ID NO: 3073 - protein, 14 aa, synthetic construct
ASGSPHSKAQNHQT

SEQ ID NO: 3074 - protein, 14 aa, synthetic construct
GSGSPHSKAENRQT

SEQ ID NO: 3075 - protein, 14 aa, synthetic construct
GSGSPHSKVQDQQT

SEQ ID NO: 3076 - protein, 14 aa, synthetic construct
GSGSPHSKAQTQQA

SEQ ID NO: 3077 - protein, 14 aa, synthetic construct
GSGSPHSKAQNQAT

SEQ ID NO: 3078 - protein, 14 aa, synthetic construct
GHDSPHKSGQIRQT

SEQ ID NO: 3079 - protein, 14 aa, synthetic construct
GHDSPHKIGQNQHA

SEQ ID NO: 3080 - protein, 14 aa, synthetic construct
GYDSPHKSGQKQQT

SEQ ID NO: 3081 - protein, 14 aa, synthetic construct
GHDSPHKSGQNQQT

SEQ ID NO: 3082 - protein, 14 aa, synthetic construct
GHDSPHKSGQSVQT

SEQ ID NO: 3083 - protein, 14 aa, synthetic construct
GHESPHKSGRSQQT

SEQ ID NO: 3084 - protein, 14 aa, synthetic construct
GHDSPHKSGQNKLE

SEQ ID NO: 3085 - protein, 14 aa, synthetic construct
GHDSPHKTGQNQQK

SEQ ID NO: 3086 - protein, 14 aa, synthetic construct
GRGSPHKRGQNQQT

SEQ ID NO: 3087 - protein, 14 aa, synthetic construct
GHDNPHKSGQNQQT

SEQ ID NO: 3088 - protein, 14 aa, synthetic construct
GQDSPHKSGQHQQA

SEQ ID NO: 3089 - protein, 14 aa, synthetic construct
GHDSPHKSGQIQHT

SEQ ID NO: 3090 - protein, 14 aa, synthetic construct
GHDSPHKSGPRQQT

SEQ ID NO: 3091 - protein, 14 aa, synthetic construct
GHDSPHKSGHTQQT

SEQ ID NO: 3092 - protein, 14 aa, synthetic construct
GHDSPHKSGQRQHT

SEQ ID NO: 3093 - protein, 14 aa, synthetic construct
GHDSPHKSAQSQQT

SEQ ID NO: 3094 - protein, 14 aa, synthetic construct
GHESPHKSGQNQQS

SEQ ID NO: 3095 - protein, 14 aa, synthetic construct
GHDSPHKSLQNQQT

SEQ ID NO: 3096 - protein, 14 aa, synthetic construct
GHDSPHKSGRNQET

SEQ ID NO: 3097 - protein, 14 aa, synthetic construct
GHDSPHKSGQTQLT

SEQ ID NO: 3098 - protein, 14 aa, synthetic construct
GHDSPHKSEKNQQT

SEQ ID NO: 3099 - protein, 14 aa, synthetic construct
GRDSPHKSGQDQQT

SEQ ID NO: 3100 - protein, 14 aa, synthetic construct
GHDSPHKTGHNQQT

SEQ ID NO: 3101 - protein, 14 aa, synthetic construct
AHDSPHKSGQNQLT

SEQ ID NO: 3102 - protein, 14 aa, synthetic construct
GYDSPHKSGQTQQT

SEQ ID NO: 3103 - protein, 14 aa, synthetic construct
GHESPHKSGQTQQI

SEQ ID NO: 3104 - protein, 14 aa, synthetic construct
GHDSPHKSGQSKQA

SEQ ID NO: 3105 - protein, 14 aa, synthetic construct
GHESPHKSGQNQQT

SEQ ID NO: 3106 - protein, 14 aa, synthetic construct
GHDSPHKTGQNQPP

SEQ ID NO: 3107 - protein, 14 aa, synthetic construct
GHDSPHKSGQSPQT

SEQ ID NO: 3108 - protein, 14 aa, synthetic construct
GNDSPHKSVQNQQT

SEQ ID NO: 3109 - protein, 14 aa, synthetic construct
GHDSPHKSAQNYQT

SEQ ID NO: 3110 - protein, 14 aa, synthetic construct
AHDSPHKIGQNHQT

SEQ ID NO: 3111 - protein, 14 aa, synthetic construct
GHESPHKSAQNRQT

SEQ ID NO: 3112 - protein, 14 aa, synthetic construct
GHDSPHKSGQNQQG

SEQ ID NO: 3113 - protein, 14 aa, synthetic construct
GQDSPHKIGQNQQT

SEQ ID NO: 3114 - protein, 14 aa, synthetic construct
GHDSPHKSGQNHLT

SEQ ID NO: 3115 - protein, 14 aa, synthetic construct
GHDSPHKSGQYQHT

SEQ ID NO: 3116 - protein, 14 aa, synthetic construct
GNDSPHKSVQNHQT

SEQ ID NO: 3117 - protein, 14 aa, synthetic construct
GHDSPHKSGQNQWT

SEQ ID NO: 3118 - protein, 14 aa, synthetic construct
GHDSPHKSVQNQHT

SEQ ID NO: 3119 - protein, 14 aa, synthetic construct
GHDSPHKSGQNQHA

SEQ ID NO: 3120 - protein, 14 aa, synthetic construct
GHDSPHKSGQTRQT

SEQ ID NO: 3121 - protein, 14 aa, synthetic construct
GHDSPHKSGQNLHT

SEQ ID NO: 3122 - protein, 14 aa, synthetic construct
GHDSPHKSGLNQQT

SEQ ID NO: 3123 - protein, 14 aa, synthetic construct
GHDSPHKSAQNQET

SEQ ID NO: 3124 - protein, 14 aa, synthetic construct
GHDSPHKSGQHLQT

SEQ ID NO: 3125 - protein, 14 aa, synthetic construct
GHDSPHKSRLNQPT

SEQ ID NO: 3126 - protein, 14 aa, synthetic construct
GHDSPHKSGQKQQT

SEQ ID NO: 3127 - protein, 14 aa, synthetic construct
GQDSPHKSGQNQDT

SEQ ID NO: 3128 - protein, 14 aa, synthetic construct
GHDSPHKSGRNQQT

SEQ ID NO: 3129 - protein, 14 aa, synthetic construct
GHDSPHKSGQNLLT

SEQ ID NO: 3130 - protein, 14 aa, synthetic construct
GHDSPHKSGQLVIT

SEQ ID NO: 3131 - protein, 14 aa, synthetic construct
GHDSPHKSRQSQQT

SEQ ID NO: 3132 - protein, 14 aa, synthetic construct
GHDSPHKSGRTQET

SEQ ID NO: 3133 - protein, 14 aa, synthetic construct
GHDSPHKSVQTHQT

SEQ ID NO: 3134 - protein, 14 aa, synthetic construct
GHDSPHKSGQNQPA

SEQ ID NO: 3135 - protein, 14 aa, synthetic construct
KHDSPHKSGQNQQT

SEQ ID NO: 3136 - protein, 14 aa, synthetic construct
GHDSPHKSGQTQQT

SEQ ID NO: 3137 - protein, 14 aa, synthetic construct
GPDSPHKIGQNQQS

SEQ ID NO: 3138 - protein, 14 aa, synthetic construct
GHDSPHKSVQNQQT

SEQ ID NO: 3139 - protein, 14 aa, synthetic construct
GHDSPHKSRQDQHT

SEQ ID NO: 3140 - protein, 14 aa, synthetic construct
GPDSPHKSGQKQQT

SEQ ID NO: 3141 - protein, 14 aa, synthetic construct
GHDSPHKSRQSQHT

SEQ ID NO: 3142 - protein, 14 aa, synthetic construct
GHDSPHKSVQNQLT

SEQ ID NO: 3143 - protein, 14 aa, synthetic construct
AHDSPHKSGQNQQT

SEQ ID NO: 3144 - protein, 14 aa, synthetic construct
GQDSPHKSGQNQQS

SEQ ID NO: 3145 - protein, 14 aa, synthetic construct
GHDSPHKSGRNQQI

SEQ ID NO: 3146 - protein, 14 aa, synthetic construct
GYDSPHKSGQYQHT

SEQ ID NO: 3147 - protein, 14 aa, synthetic construct
GHDSPHKSRQNQQT

SEQ ID NO: 3148 - protein, 14 aa, synthetic construct
GHDSPHKSWVRQQT

SEQ ID NO: 3149 - protein, 14 aa, synthetic construct
GHESPHKSGQNQHS

SEQ ID NO: 3150 - protein, 14 aa, synthetic construct
GHDSPHKIGHNQQT

SEQ ID NO: 3151 - protein, 14 aa, synthetic construct
WHDSPHKSGQNQQT

SEQ ID NO: 3152 - protein, 14 aa, synthetic construct
RHDSPHKSGQNQQT

SEQ ID NO: 3153 - protein, 14 aa, synthetic construct
GHDSPHKSNAWQQT

SEQ ID NO: 3154 - protein, 14 aa, synthetic construct
GHDSPHKSGQSVPT

SEQ ID NO: 3155 - protein, 14 aa, synthetic construct
GHESPHKSGQNIQP

SEQ ID NO: 3156 - protein, 14 aa, synthetic construct
GHDSPHKSVQNHLN

SEQ ID NO: 3157 - protein, 14 aa, synthetic construct
GHDSPHKIGLDQQT

SEQ ID NO: 3158 - protein, 14 aa, synthetic construct
GHDSPHKRGPDQQS

SEQ ID NO: 3159 - protein, 14 aa, synthetic construct
GHDSPHKSGESQQT

SEQ ID NO: 3160 - protein, 14 aa, synthetic construct
GHDSPHKHGQNHQT

SEQ ID NO: 3161 - protein, 14 aa, synthetic construct
LHDSPHKSGQNQQT

SEQ ID NO: 3162 - protein, 14 aa, synthetic construct
GHDSPHKSVQNKQT

SEQ ID NO: 3163 - protein, 14 aa, synthetic construct
GQVSPHKSGQNQQT

SEQ ID NO: 3164 - protein, 14 aa, synthetic construct
GHDSPHKSGQRQLT

SEQ ID NO: 3165 - protein, 14 aa, synthetic construct
GHDSPHKIGQNQLT

SEQ ID NO: 3166 - protein, 14 aa, synthetic construct
GHDSPHKSGQIIVT

SEQ ID NO: 3167 - protein, 14 aa, synthetic construct
IHDSPHKSGQNQQT

SEQ ID NO: 3168 - protein, 14 aa, synthetic construct
GYDSPHKSGQKQST

SEQ ID NO: 3169 - protein, 14 aa, synthetic construct
MHDSPHKSGQNQQT

SEQ ID NO: 3170 - protein, 14 aa, synthetic construct
GDDSPHKSVQNQQT

SEQ ID NO: 3171 - protein, 14 aa, synthetic construct
GHDSPHKSVQSHQT

SEQ ID NO: 3172 - protein, 14 aa, synthetic construct
GHDSPHKSGQFVVT

SEQ ID NO: 3173 - protein, 14 aa, synthetic construct
GHDSPHKSRQNLQT

SEQ ID NO: 3174 - protein, 14 aa, synthetic construct
GHNSPHKSGQNQET

SEQ ID NO: 3175 - protein, 14 aa, synthetic construct
GHDSPHKSAQNQQI

SEQ ID NO: 3176 - protein, 14 aa, synthetic construct
NHDSPHKSGQNQQT

SEQ ID NO: 3177 - protein, 14 aa, synthetic construct
GHDSPHKSGQSQPT

SEQ ID NO: 3178 - protein, 14 aa, synthetic construct
GHESPHKSGQNEQT

SEQ ID NO: 3179 - protein, 14 aa, synthetic construct
GHDSPHKSAQNQQT

SEQ ID NO: 3180 - protein, 14 aa, synthetic construct
GHDSPHKSGQNQLT

SEQ ID NO: 3181 - protein, 14 aa, synthetic construct
GHDSPHKSAQNLLT

SEQ ID NO: 3182 - protein, 14 aa, synthetic construct
THDSPHKSGQNQQT

SEQ ID NO: 3183 - protein, 14 aa, synthetic construct
GNGSPHKRGQNQQT

SEQ ID NO: 3184 - protein, 14 aa, synthetic construct
GHDSPHKSGQSLQT

SEQ ID NO: 3185 - protein, 14 aa, synthetic construct
GHDSPHKSAQNHQT

SEQ ID NO: 3186 - protein, 14 aa, synthetic construct
GHDSPHKSGRNRQT

SEQ ID NO: 3187 - protein, 14 aa, synthetic construct
EHDSPHKSGQNQQT

SEQ ID NO: 3188 - protein, 14 aa, synthetic construct
GHDSPHKYGQNEQT

SEQ ID NO: 3189 - protein, 14 aa, synthetic construct
RHDSPHKSGHNQQT

SEQ ID NO: 3190 - protein, 14 aa, synthetic construct
GHDSPHKSQQNQQT

SEQ ID NO: 3191 - protein, 14 aa, synthetic construct
GHDSPHKSGQNQQI

SEQ ID NO: 3192 - protein, 14 aa, synthetic construct
QHDSPHKSGQNQQT

SEQ ID NO: 3193 - protein, 14 aa, synthetic construct
RHDSPHKIVQNQQT

SEQ ID NO: 3194 - protein, 14 aa, synthetic construct
YHDSPHKSGQNQQT

SEQ ID NO: 3195 - protein, 14 aa, synthetic construct
GHDSPHKSVQSKQT

SEQ ID NO: 3196 - protein, 14 aa, synthetic construct
GNDSPHKIGHNQQT

SEQ ID NO: 3197 - protein, 14 aa, synthetic construct
HHDSPHKSGQNQQT

SEQ ID NO: 3198 - protein, 14 aa, synthetic construct
GHDSPHKSGQTQQI

SEQ ID NO: 3199 - protein, 14 aa, synthetic construct
GQDSPHKSGQNPLT

SEQ ID NO: 3200 - protein, 14 aa, synthetic construct
GHDSPHKSGRDQKT

SEQ ID NO: 3201 - protein, 14 aa, synthetic construct
GHDSPHKSVHNQQN

SEQ ID NO: 3202 - protein, 14 aa, synthetic construct
GHDSPHKSGQWKRT

SEQ ID NO: 3203 - protein, 14 aa, synthetic construct
GHDSPHKSGQSQQI

SEQ ID NO: 3204 - protein, 14 aa, synthetic construct
GHDSPHKSRQAQQT

SEQ ID NO: 3205 - protein, 14 aa, synthetic construct
GHDSPHKSVQNHQI

SEQ ID NO: 3206 - protein, 14 aa, synthetic construct
GHDSPHKSKQNQQA

SEQ ID NO: 3207 - protein, 14 aa, synthetic construct
GHDSPHKSAQNQLN

SEQ ID NO: 3208 - protein, 14 aa, synthetic construct
GHDSPHKSGQTQPT

SEQ ID NO: 3209 - protein, 14 aa, synthetic construct
FHDSPHKSGQNQQT

SEQ ID NO: 3210 - protein, 14 aa, synthetic construct
GHDSPHKLWINQQT

SEQ ID NO: 3211 - protein, 14 aa, synthetic construct
GPDSPHKSGQNQQT

SEQ ID NO: 3212 - protein, 14 aa, synthetic construct
GHDSPHKSVQKQLT

SEQ ID NO: 3213 - protein, 14 aa, synthetic construct
GHDSPHKSGRNQLA

SEQ ID NO: 3214 - protein, 14 aa, synthetic construct
VHDSPHKSGQNQQS

SEQ ID NO: 3215 - protein, 14 aa, synthetic construct
GHDSPHKMGRNQQS

SEQ ID NO: 3216 - protein, 14 aa, synthetic construct
GHDSPHKSGISIQT

SEQ ID NO: 3217 - protein, 14 aa, synthetic construct
VHDSPHKSGQNQQT

SEQ ID NO: 3218 - protein, 14 aa, synthetic construct
GHDSPHKSVQNLQT

SEQ ID NO: 3219 - protein, 14 aa, synthetic construct
GHDSPHKMAHNQQT

SEQ ID NO: 3220 - protein, 14 aa, synthetic construct
GHDSPHKHGQNQQN

SEQ ID NO: 3221 - protein, 14 aa, synthetic construct
GHDSPHKSVQSQQS

SEQ ID NO: 3222 - protein, 14 aa, synthetic construct
GHDSPHKSGQTVCT

SEQ ID NO: 3223 - protein, 14 aa, synthetic construct
GQDSPHKSGQYQQI

SEQ ID NO: 3224 - protein, 14 aa, synthetic construct
GHDSPHKSGQQIMT

SEQ ID NO: 3225 - protein, 14 aa, synthetic construct
GHDSPHKSRQNEQS

SEQ ID NO: 3226 - protein, 14 aa, synthetic construct
GHDSPHKSGLNHQT

SEQ ID NO: 3227 - protein, 14 aa, synthetic construct
GYDSPHKSGQNQQT

SEQ ID NO: 3228 - protein, 14 aa, synthetic construct
GHDSPHKSGQNLQT

SEQ ID NO: 3229 - protein, 14 aa, synthetic construct
GHDSPHKSRQDQQT

SEQ ID NO: 3230 - protein, 14 aa, synthetic construct
GDDSPHKSGQKQLT

SEQ ID NO: 3231 - protein, 14 aa, synthetic construct
GDDSPHKSGHNQQT

SEQ ID NO: 3232 - protein, 14 aa, synthetic construct
GHDSPHKSGQMIHT

SEQ ID NO: 3233 - protein, 14 aa, synthetic construct
GHDSPHKSGRNHQS

SEQ ID NO: 3234 - protein, 14 aa, synthetic construct
GHDSPHKSVQNRQT

SEQ ID NO: 3235 - protein, 14 aa, synthetic construct
GHDSPHKSGQKMNT

SEQ ID NO: 3236 - protein, 14 aa, synthetic construct
GHDSPHKSGQSQQN

SEQ ID NO: 3237 - protein, 14 aa, synthetic construct
GHDSPHKSGQYQHA

SEQ ID NO: 3238 - skipped

SEQ ID NO: 3239 - protein, 18 aa, synthetic construct
KTIIGSGSPHSKAQNRHT

SEQ ID NO: 3240 - protein, 18 aa, synthetic construct
KTFPGSGSPHSKVQNQQT

SEQ ID NO: 3241 - protein, 18 aa, synthetic construct
KTEKMSGSPHSKAQNQQT

SEQ ID NO: 3242 - protein, 18 aa, synthetic construct
KTVNGSGSPHSKARDQQT

SEQ ID NO: 3243 - protein, 18 aa, synthetic construct
KTFNGSGSPHSKAPNLQT

SEQ ID NO: 3244 - protein, 18 aa, synthetic construct
KTEKTSGSPHSKAQNQQT

SEQ ID NO: 3245 - protein, 18 aa, synthetic construct
KTINGSGSPHSKAHVRQT

SEQ ID NO: 3246 - protein, 18 aa, synthetic construct
KTVNGSGSPHSKAPNQHT

SEQ ID NO: 3247 - protein, 18 aa, synthetic construct
KTEKISGSPHSKAQNQQT

SEQ ID NO: 3248 - protein, 18 aa, synthetic construct
KTVNGSGSPHSKTQSQQT

SEQ ID NO: 3249 - protein, 18 aa, synthetic construct
TTINGSGSPHSKAQNQQT

SEQ ID NO: 3250 - protein, 18 aa, synthetic construct
KSINESGSPHSKAQNQQI

SEQ ID NO: 3251 - protein, 18 aa, synthetic construct
KTERTSGSPHSKAQNQQT

SEQ ID NO: 3252 - protein, 18 aa, synthetic construct
KTINGSGSPHSKAQPAKT

SEQ ID NO: 3253 - protein, 18 aa, synthetic construct
KTEKSSGSPHSKAQNQQT

SEQ ID NO: 3254 - protein, 18 aa, synthetic construct
KTEKGSGSPHSKAQNQQT

SEQ ID NO: 3255 - protein, 18 aa, synthetic construct
KTINGSGSPHSKSQTQQN

SEQ ID NO: 3256 - protein, 18 aa, synthetic construct
KTERISGSPHSKAQNQQT

SEQ ID NO: 3257 - protein, 18 aa, synthetic construct
KTERASGSPHSKAQNQQT

SEQ ID NO: 3258 - protein, 18 aa, synthetic construct
KELHGSGSPHSKAQNQQT

SEQ ID NO: 3259 - protein, 18 aa, synthetic construct
KAINGSGSPHSKAQNLAT

SEQ ID NO: 3260 - protein, 18 aa, synthetic construct
KTVNGSGSPHSKSQNQLT

SEQ ID NO: 3261 - protein, 18 aa, synthetic construct
KTERNSGSPHSKAQNQQT

SEQ ID NO: 3262 - protein, 18 aa, synthetic construct
KTFNGSGSPHSKAQGQQT

SEQ ID NO: 3263 - protein, 18 aa, synthetic construct
KTERVSGSPHSKAQNQQT

SEQ ID NO: 3264 - protein, 18 aa, synthetic construct
KTINGSGSPHSKALNRQS

SEQ ID NO: 3265 - protein, 18 aa, synthetic construct
KTERLSGSPHSKAQNQQT

SEQ ID NO: 3266 - protein, 18 aa, synthetic construct
KTDNGSGSPHSKAHNQQT

SEQ ID NO: 3267 - protein, 18 aa, synthetic construct
KTFHGSGSPHSKTQNQQT

SEQ ID NO: 3268 - protein, 18 aa, synthetic construct
KTSNGSGSPHSKAQNPPT

SEQ ID NO: 3269 - protein, 18 aa, synthetic construct
ETINGSGSPHSKAQNLQT

SEQ ID NO: 3270 - protein, 18 aa, synthetic construct
NTINGSGSPHSKAQNQQT

SEQ ID NO: 3271 - protein, 18 aa, synthetic construct
KTENMSGSPHSKAQNQQT

SEQ ID NO: 3272 - protein, 18 aa, synthetic construct
KTENVSGSPHSKAQNQQT

SEQ ID NO: 3273 - protein, 18 aa, synthetic construct
KTSSGSGSPHSKAQYQQT

SEQ ID NO: 3274 - protein, 18 aa, synthetic construct
KTEKVSGSPHSKAQNQQT

SEQ ID NO: 3275 - protein, 18 aa, synthetic construct
KAINGSGSPHSKAQDQET

SEQ ID NO: 3276 - protein, 18 aa, synthetic construct
KTCNKSGSPHSKAQNQQT

SEQ ID NO: 3277 - protein, 18 aa, synthetic construct
KTEHLSGSPHSKAQNQQT

SEQ ID NO: 3278 - protein, 18 aa, synthetic construct
KAEMGSGSPHSKAQNQQT

SEQ ID NO: 3279 - protein, 18 aa, synthetic construct
KATNGSGSPHSKAQNHQT

SEQ ID NO: 3280 - protein, 18 aa, synthetic construct
KAIKGSGSPHSKAQDQQT

SEQ ID NO: 3281 - protein, 18 aa, synthetic construct
KTINGSGSPHSKGHWQQT

SEQ ID NO: 3282 - protein, 18 aa, synthetic construct
KTDKTSGSPHSKAQNQQT

SEQ ID NO: 3283 - protein, 18 aa, synthetic construct
KTFKGSGSPHSKAPNQQT

SEQ ID NO: 3284 - protein, 18 aa, synthetic construct
KTVNGSGSPHSKAQNQLI

SEQ ID NO: 3285 - protein, 18 aa, synthetic construct
KTINGSGSPHSKRPEQQT

SEQ ID NO: 3286 - protein, 18 aa, synthetic construct
KTINGSGSPHSKAQRTMT

SEQ ID NO: 3287 - protein, 18 aa, synthetic construct
KTEKASGSPHSKAQNQQT

SEQ ID NO: 3288 - protein, 18 aa, synthetic construct
KSDQGSGSPHSKAQNQQT

SEQ ID NO: 3289 - protein, 18 aa, synthetic construct
KTEITSGSPHSKAQNQQT

SEQ ID NO: 3290 - protein, 18 aa, synthetic construct
KTDKSSGSPHSKAQNQQT

SEQ ID NO: 3291 - protein, 18 aa, synthetic construct
KTIDGSGSPHSKAQNQQH

SEQ ID NO: 3292 - protein, 18 aa, synthetic construct
KNTNGSGSPHSKAQNQQT

SEQ ID NO: 3293 - protein, 18 aa, synthetic construct
KTETHSGSPHSKAQNQQT

SEQ ID NO: 3294 - protein, 18 aa, synthetic construct
KTINGSGSPHSKALHQHT

SEQ ID NO: 3295 - protein, 18 aa, synthetic construct
KTINGSGSPHSKAQHRIT

SEQ ID NO: 3296 - protein, 18 aa, synthetic construct
KTINGSGSPHSKAQYIHT

SEQ ID NO: 3297 - protein, 18 aa, synthetic construct
KTENISGSPHSKAQNQQT

SEQ ID NO: 3298 - protein, 18 aa, synthetic construct
KTINGSGSPHSKAQKFET

SEQ ID NO: 3299 - protein, 18 aa, synthetic construct
KTSNESGSPHSKAQNHQT

SEQ ID NO: 3300 - protein, 18 aa, synthetic construct
KTINGSGSPHSKAQFPST

SEQ ID NO: 3301 - protein, 18 aa, synthetic construct
KTERPSGSPHSKAQNQQT

SEQ ID NO: 3302 - protein, 18 aa, synthetic construct
KTERMSGSPHSKAQNQQT

SEQ ID NO: 3303 - protein, 18 aa, synthetic construct
KTERSSGSPHSKAQNQQT

SEQ ID NO: 3304 - protein, 18 aa, synthetic construct
KTELHSGSPHSKAQNQQT

SEQ ID NO: 3305 - protein, 18 aa, synthetic construct
KTELTSGSPHSKAQNQQT

SEQ ID NO: 3306 - protein, 18 aa, synthetic construct
KTINGSGSPHSKAHNQQR

SEQ ID NO: 3307 - protein, 18 aa, synthetic construct
KTINGSGSPHSKAQAIKT

SEQ ID NO: 3308 - protein, 18 aa, synthetic construct
KTENTSGSPHSKAQNQQT

SEQ ID NO: 3309 - protein, 18 aa, synthetic construct
KTIDGSGSPHSKGQNRQT

SEQ ID NO: 3310 - protein, 18 aa, synthetic construct
KNINGSGSPHSKAQSQQT

SEQ ID NO: 3311 - protein, 18 aa, synthetic construct
KTSNASGSPHSKAQNQLT

SEQ ID NO: 3312 - protein, 18 aa, synthetic construct
KTEARSGSPHSKAQNQQT

SEQ ID NO: 3313 - protein, 18 aa, synthetic construct
KTEKNSGSPHSKAQNQQT

SEQ ID NO: 3314 - protein, 18 aa, synthetic construct
KTANGSGSPHSKAQYQQT

SEQ ID NO: 3315 - protein, 18 aa, synthetic construct
KTVNGSGSPHSKAQYQHT

SEQ ID NO: 3316 - protein, 18 aa, synthetic construct
KTINGSGSPHTKAQNPQS

SEQ ID NO: 3317 - protein, 18 aa, synthetic construct
KTINGSGSPHSKGQNPPT

SEQ ID NO: 3318 - protein, 18 aa, synthetic construct
KTIIGSGSPHSKAQHQLT

SEQ ID NO: 3319 - protein, 18 aa, synthetic construct
KTINGSGSPHSKAQSPPT

SEQ ID NO: 3320 - protein, 18 aa, synthetic construct
NTIYGSGSPHSKAQNQQT

SEQ ID NO: 3321 - protein, 18 aa, synthetic construct
KTINGSGSPHSKAQAKLT

SEQ ID NO: 3322 - protein, 18 aa, synthetic construct
KTDKNSGSPHSKAQNQQT

SEQ ID NO: 3323 - protein, 18 aa, synthetic construct
KTINGSGSPHSKTKSQQT

SEQ ID NO: 3324 - protein, 18 aa, synthetic construct
KTINGSGSPHSKAQDRPT

SEQ ID NO: 3325 - protein, 18 aa, synthetic construct
KTINGSGSPHSKAQSQQL

SEQ ID NO: 3326 - protein, 18 aa, synthetic construct
KTENLSGSPHSKAQNQQT

SEQ ID NO: 3327 - protein, 18 aa, synthetic construct
KTINGSGSPHSKAQAFHT

SEQ ID NO: 3328 - protein, 18 aa, synthetic construct
KTINGSGSPHSKAQKQQD

SEQ ID NO: 3329 - protein, 18 aa, synthetic construct
KTFSGSGSPHSKAQNLQT

SEQ ID NO: 3330 - protein, 18 aa, synthetic construct
KAINGSGSPHSKAQNAQT

SEQ ID NO: 3331 - protein, 18 aa, synthetic construct
KTESWSGSPHSKAQNQQT

SEQ ID NO: 3332 - protein, 18 aa, synthetic construct
KTTNGSGSPHSKAHNQLT

SEQ ID NO: 3333 - protein, 18 aa, synthetic construct
KTEDKSGSPHSKAQNQQT

SEQ ID NO: 3334 - protein, 18 aa, synthetic construct
KTESASGSPHSKAQNQQT

SEQ ID NO: 3335 - protein, 18 aa, synthetic construct
KTNNGSGSPHSKAQNQQY

SEQ ID NO: 3336 - protein, 18 aa, synthetic construct
KTDKMSGSPHSKAQNQQT

SEQ ID NO: 3337 - protein, 18 aa, synthetic construct
KEVHGSGSPHSKAQNQQT

SEQ ID NO: 3338 - protein, 18 aa, synthetic construct
KTINGSGSPHSKAQKLNT

SEQ ID NO: 3339 - protein, 18 aa, synthetic construct
KTTNGSGSPHSKAQYQHT

SEQ ID NO: 3340 - protein, 18 aa, synthetic construct
KTISGSGSPHSKAQYQHT

SEQ ID NO: 3341 - protein, 18 aa, synthetic construct
KTESTSGSPHSKAQNQQT

SEQ ID NO: 3342 - protein, 18 aa, synthetic construct
KTINGSGSPHSKSQNVQT

SEQ ID NO: 3343 - protein, 18 aa, synthetic construct
KSINGSGSPHSKAQAQQT

SEQ ID NO: 3344 - protein, 18 aa, synthetic construct
KTVNGSGSPHSKAQNLQA

SEQ ID NO: 3345 - protein, 18 aa, synthetic construct
KTVRDSGSPHSKAQNQQT

SEQ ID NO: 3346 - protein, 18 aa, synthetic construct
KTFNASGSPHSKAPNQQT

SEQ ID NO: 3347 - protein, 18 aa, synthetic construct
KTDRMSGSPHSKAQNQQT

SEQ ID NO: 3348 - protein, 18 aa, synthetic construct
KTINGSGSPHSKAQTPPT

SEQ ID NO: 3349 - protein, 18 aa, synthetic construct
ETIKGSGSPHSKAQNQQT

SEQ ID NO: 3350 - protein, 18 aa, synthetic construct
KNHIGSGSPHSKAQNQQT

SEQ ID NO: 3351 - protein, 18 aa, synthetic construct
KTINGSGSPHSKAQYQHA

SEQ ID NO: 3352 - protein, 18 aa, synthetic construct
KTINGSGSPHSKAQGQQA

SEQ ID NO: 3353 - protein, 18 aa, synthetic construct
KTFNGSGSPHNKAQNHQT

SEQ ID NO: 3354 - protein, 18 aa, synthetic construct
KESDGSGSPHSKAQNQQT

SEQ ID NO: 3355 - protein, 18 aa, synthetic construct
KTINGSGSPHSKAQPPAT

SEQ ID NO: 3356 - protein, 18 aa, synthetic construct
KTINGSGSPHSKAQERPT

SEQ ID NO: 3357 - protein, 18 aa, synthetic construct
KTIKGSGSPHSKAQDLQT

SEQ ID NO: 3358 - protein, 18 aa, synthetic construct
KTDLKSGSPHSKAQNQQT

SEQ ID NO: 3359 - protein, 18 aa, synthetic construct
KTINGSGSPHSKAQAMHT

SEQ ID NO: 3360 - protein, 18 aa, synthetic construct
KTVPNSGSPHSKAQNQQT

SEQ ID NO: 3361 - protein, 18 aa, synthetic construct
KTVIGSGSPHSKALNQQT

SEQ ID NO: 3362 - protein, 18 aa, synthetic construct
KTINGSGSPHSKAQHPST

SEQ ID NO: 3363 - protein, 18 aa, synthetic construct
KTINGSGSPHSKAPGLQT

SEQ ID NO: 3364 - protein, 18 aa, synthetic construct
KTINGSGSPHSKAQGIRT

SEQ ID NO: 3365 - protein, 18 aa, synthetic construct
KTESHSGSPHSKAQNQQT

SEQ ID NO: 3366 - protein, 18 aa, synthetic construct
KTINGSGSPHSKAQAPAT

SEQ ID NO: 3367 - protein, 18 aa, synthetic construct
KTINGSGSPHSKSQSQQI

SEQ ID NO: 3368 - protein, 18 aa, synthetic construct
KAEHGSGSPHSKAQNQQT

SEQ ID NO: 3369 - protein, 18 aa, synthetic construct
KTEDRSGSPHSKAQNQQT

SEQ ID NO: 3370 - protein, 18 aa, synthetic construct
KNCLGSGSPHSKAQNQQT

SEQ ID NO: 3371 - protein, 18 aa, synthetic construct
KTDRGSGSPHSKAQNQQT

SEQ ID NO: 3372 - protein, 18 aa, synthetic construct
KTINGSGSPHSKAQIPPT

SEQ ID NO: 3373 - protein, 18 aa, synthetic construct
KTVKGSGSPHSKAQDQQT

SEQ ID NO: 3374 - protein, 18 aa, synthetic construct
KNADGSGSPHSKAQNQQT

SEQ ID NO: 3375 - protein, 18 aa, synthetic construct
KTDKVSGSPHSKAQNQQT

SEQ ID NO: 3376 - protein, 18 aa, synthetic construct
KTITGSGSPHSKAQTQLT

SEQ ID NO: 3377 - protein, 18 aa, synthetic construct
KTINGSGSPHSKAQAPST

SEQ ID NO: 3378 - protein, 18 aa, synthetic construct
KNCVGSGSPHSKAQNQQT

SEQ ID NO: 3379 - protein, 18 aa, synthetic construct
KTVKDSGSPHSKAQNQQT

SEQ ID NO: 3380 - protein, 18 aa, synthetic construct
KNALGSGSPHSKAQNQQT

SEQ ID NO: 3381 - protein, 18 aa, synthetic construct
KVINGSGSPHSKGQNQQT

SEQ ID NO: 3382 - protein, 18 aa, synthetic construct
KTSNASGSPHSKAHNQQT

SEQ ID NO: 3383 - protein, 18 aa, synthetic construct
KTINGSGSPHSKAQNTYA

SEQ ID NO: 3384 - protein, 18 aa, synthetic construct
KTINGSGSPHSKSQNQHI

SEQ ID NO: 3385 - protein, 18 aa, synthetic construct
KTEFVSGSPHSKAQNQQT

SEQ ID NO: 3386 - protein, 18 aa, synthetic construct
KTVNGSGSPHSKAQNHLT

SEQ ID NO: 3387 - protein, 18 aa, synthetic construct
KTREISGSPHSKAQNQQT

SEQ ID NO: 3388 - protein, 18 aa, synthetic construct
KTINGSGSPHSKAQIGMT

SEQ ID NO: 3389 - protein, 18 aa, synthetic construct
KTIDGSGSPHSKALNKQT

SEQ ID NO: 3390 - protein, 18 aa, synthetic construct
KQGEGSGSPHSKAQNQQT

SEQ ID NO: 3391 - protein, 18 aa, synthetic construct
KTVNGSGSPHSKAQLQQT

SEQ ID NO: 3392 - protein, 18 aa, synthetic construct
KSINGSGSPHSKTQSQQT

SEQ ID NO: 3393 - protein, 18 aa, synthetic construct
KSEKGSGSPHSKAQNQQT

SEQ ID NO: 3394 - protein, 18 aa, synthetic construct
KNVNGSGSPHSKAQNQQT

SEQ ID NO: 3395 - protein, 18 aa, synthetic construct
KGGEGSGSPHSKAQNQQT

SEQ ID NO: 3396 - protein, 18 aa, synthetic construct
KTINGSGSPHSKAQRMST

SEQ ID NO: 3397 - protein, 18 aa, synthetic construct
KTINGSGSPHSKAQGILT

SEQ ID NO: 3398 - protein, 18 aa, synthetic construct
KEFVGSGSPHSKAQNQQT

SEQ ID NO: 3399 - protein, 18 aa, synthetic construct
KTIIGSGSPHSKAQDRQT

SEQ ID NO: 3400 - protein, 18 aa, synthetic construct
KSDKGSGSPHSKAQNQQT

SEQ ID NO: 3401 - protein, 18 aa, synthetic construct
KTEQVSGSPHSKAQNQQT

SEQ ID NO: 3402 - protein, 18 aa, synthetic construct
KTEHVSGSPHSKAQNQQT

SEQ ID NO: 3403 - protein, 18 aa, synthetic construct
KTINGSGSPHSKARDWQT

SEQ ID NO: 3404 - protein, 18 aa, synthetic construct
KTENASGSPHSKAQNQQT

SEQ ID NO: 3405 - protein, 18 aa, synthetic construct
KEVQGSGSPHSKAQNQQT

SEQ ID NO: 3406 - protein, 18 aa, synthetic construct
KTINGSGSPHSKAQNTHD

SEQ ID NO: 3407 - protein, 18 aa, synthetic construct
KTINGSGSPHSKAPNLQI

SEQ ID NO: 3408 - protein, 18 aa, synthetic construct
KTINGSGSPHSKAQERST

SEQ ID NO: 3409 - protein, 18 aa, synthetic construct
KTSNGSGSPHSKAQNYQT

SEQ ID NO: 3410 - protein, 18 aa, synthetic construct
KTEYISGSPHSKAQNQQT

SEQ ID NO: 3411 - protein, 18 aa, synthetic construct
KTINGSGSPHSKAQRTCT

SEQ ID NO: 3412 - protein, 18 aa, synthetic construct
KTINGSGSPHSKAQIGHT

SEQ ID NO: 3413 - protein, 18 aa, synthetic construct
KNCWGSGSPHSKAQNQQT

SEQ ID NO: 3414 - protein, 18 aa, synthetic construct
KTINGSGSPHSKAQGAIT

SEQ ID NO: 3415 - protein, 18 aa, synthetic construct
KTDVNSGSPHSKAQNQQT

SEQ ID NO: 3416 - protein, 18 aa, synthetic construct
KSDIGSGSPHSKAQNQQT

SEQ ID NO: 3417 - protein, 18 aa, synthetic construct
KTINGSGSPHSKAQVPPT

SEQ ID NO: 3418 - protein, 18 aa, synthetic construct
KTINGSGSPHSKAQVQQI

SEQ ID NO: 3419 - protein, 18 aa, synthetic construct
KTINGSGSPHSKALMRQT

SEQ ID NO: 3420 - protein, 18 aa, synthetic construct
KTINGSGSPHSKAQYSVT

SEQ ID NO: 3421 - protein, 18 aa, synthetic construct
KNSIGSGSPHSKAQNQQT

SEQ ID NO: 3422 - protein, 18 aa, synthetic construct
KTINGSGSPHSKVPNLQT

SEQ ID NO: 3423 - protein, 18 aa, synthetic construct
KAINGSGSPHSKAQSQQI

SEQ ID NO: 3424 - protein, 18 aa, synthetic construct
KTINGSGSPHSKAQAITT

SEQ ID NO: 3425 - protein, 18 aa, synthetic construct
KTINGSGSPHSKAQKTLT

SEQ ID NO: 3426 - protein, 18 aa, synthetic construct
KTVNGSGSPHSKAQNQWT

SEQ ID NO: 3427 - protein, 18 aa, synthetic construct
KTINGSGSPHSKAQLHHT

SEQ ID NO: 3428 - protein, 18 aa, synthetic construct
KTEQTSGSPHSKAQNQQT

SEQ ID NO: 3429 - protein, 18 aa, synthetic construct
KTINGSGSPHSKAQNIII

SEQ ID NO: 3430 - protein, 18 aa, synthetic construct
KNSLGSGSPHSKAQNQQT

SEQ ID NO: 3431 - protein, 18 aa, synthetic construct
KTINGSGSPHSKAQGHHT

SEQ ID NO: 3432 - protein, 18 aa, synthetic construct
KTDRTSGSPHSKAQNQQT

SEQ ID NO: 3433 - protein, 18 aa, synthetic construct
KTINGSGSPHSKAQSKVT

SEQ ID NO: 3434 - protein, 18 aa, synthetic construct
KEVVGSGSPHSKAQNQQT

SEQ ID NO: 3435 - protein, 18 aa, synthetic construct
KTINGSGSPHSKAQLPST

SEQ ID NO: 3436 - protein, 18 aa, synthetic construct
KTINGSGSPHSKAIGKQT

SEQ ID NO: 3437 - protein, 18 aa, synthetic construct
KTEPTSGSPHSKAQNQQT

SEQ ID NO: 3438 - protein, 18 aa, synthetic construct
KTINGSGSPHSKAQAIHT

SEQ ID NO: 3439 - protein, 18 aa, synthetic construct
KTINGSGSPHSKAQHGLT

SEQ ID NO: 3440 - protein, 18 aa, synthetic construct
KSELGSGSPHSKAQNQQT

SEQ ID NO: 3441 - protein, 18 aa, synthetic construct
KTINGSGSPHSKAQFMCT

SEQ ID NO: 3442 - protein, 18 aa, synthetic construct
KTINVSGSPHSKAQGQQT

SEQ ID NO: 3443 - protein, 18 aa, synthetic construct
KTVNGSGSPHSKAQHLQT

SEQ ID NO: 3444 - protein, 18 aa, synthetic construct
KTINGSGSPHSKTQNHQN

SEQ ID NO: 3445 - protein, 18 aa, synthetic construct
KTINGSGSPHSKAQPART

SEQ ID NO: 3446 - protein, 18 aa, synthetic construct
KTVNGSGSPHSKAQSLQT

SEQ ID NO: 3447 - protein, 18 aa, synthetic construct
KTINGSGSPHSKSQSQLT

SEQ ID NO: 3448 - protein, 18 aa, synthetic construct
KTWQNSGSPHSKAQNQQT

SEQ ID NO: 3449 - protein, 18 aa, synthetic construct
KTINGSGSPHSKAQDRQS

SEQ ID NO: 3450 - protein, 18 aa, synthetic construct
KTINGSGSPHSKAQMPST

SEQ ID NO: 3451 - protein, 18 aa, synthetic construct
KTINGSGSPHSKAQGSLT

SEQ ID NO: 3452 - protein, 18 aa, synthetic construct
KTEVTSGSPHSKAQNQQT

SEQ ID NO: 3453 - protein, 18 aa, synthetic construct
KTVIGSGSPHSKSQNQQT

SEQ ID NO: 3454 - protein, 18 aa, synthetic construct
KAVNVSGSPHSKAQNQQT

SEQ ID NO: 3455 - protein, 18 aa, synthetic construct
KTDRNSGSPHSKAQNQQT

SEQ ID NO: 3456 - protein, 18 aa, synthetic construct
KTINGSGSPHSKAQVPAT

SEQ ID NO: 3457 - protein, 18 aa, synthetic construct
KGVLGSGSPHSKAQNQQT

SEQ ID NO: 3458 - protein, 18 aa, synthetic construct
KAINGSGSPHSKAQDKQT

SEQ ID NO: 3459 - protein, 18 aa, synthetic construct
KTSNGSGSPHSKAHYQQT

SEQ ID NO: 3460 - protein, 18 aa, synthetic construct
KTINGSGSPHSKAQVPST

SEQ ID NO: 3461 - protein, 18 aa, synthetic construct
KTELRSGSPHSKAQNQQT

SEQ ID NO: 3462 - protein, 18 aa, synthetic construct
KNINGSGSPHSKAQNHQT

SEQ ID NO: 3463 - protein, 18 aa, synthetic construct
KTINGSGSPHSKARGEQT

SEQ ID NO: 3464 - protein, 18 aa, synthetic construct
KTEDLSGSPHSKAQNQQT

SEQ ID NO: 3465 - protein, 18 aa, synthetic construct
KTINGSGSPHSKAPGQQT

SEQ ID NO: 3466 - protein, 18 aa, synthetic construct
KTINGSGSPHSKAQSLQI

SEQ ID NO: 3467 - protein, 18 aa, synthetic construct
KTINGSGSPHSKRLEQQT

SEQ ID NO: 3468 - protein, 18 aa, synthetic construct
KTERGSGSPHSKAQNQQT

SEQ ID NO: 3469 - protein, 18 aa, synthetic construct
KTVNGSGSPHSKAPNQQT

SEQ ID NO: 3470 - protein, 18 aa, synthetic construct
KTSNGSGSPHSKAQNQST

SEQ ID NO: 3471 - protein, 18 aa, synthetic construct
KTINGSGSPHSKAQKVIT

SEQ ID NO: 3472 - protein, 18 aa, synthetic construct
KTEGISGSPHSKAQNQQT

SEQ ID NO: 3473 - protein, 18 aa, synthetic construct
KTINGSGSPHSKAQNNDQ

SEQ ID NO: 3474 - protein, 18 aa, synthetic construct
KTINGSGSPHSKAQSVHT

SEQ ID NO: 3475 - protein, 18 aa, synthetic construct
KTINGSGSPHSKAQPLGT

SEQ ID NO: 3476 - protein, 18 aa, synthetic construct
KTCNASGSPHSKAQNQQT

SEQ ID NO: 3477 - protein, 18 aa, synthetic construct
KAINGSGSPHSKAHNQET

SEQ ID NO: 3478 - protein, 18 aa, synthetic construct
KTEGLSGSPHSKAQNQQT

SEQ ID NO: 3479 - protein, 18 aa, synthetic construct
KTRDASGSPHSKAQNQQT

SEQ ID NO: 3480 - protein, 18 aa, synthetic construct
KTSNGSGSPHSKAQNLQI

SEQ ID NO: 3481 - protein, 18 aa, synthetic construct
KTGNGSGSPHSKAQIQQT

SEQ ID NO: 3482 - protein, 18 aa, synthetic construct
KTDRSSGSPHSKAQNQQT

SEQ ID NO: 3483 - protein, 18 aa, synthetic construct
KTINGSGSPHSKAQVRNT

SEQ ID NO: 3484 - protein, 18 aa, synthetic construct
KTINGSGSPHSKAPSNQT

SEQ ID NO: 3485 - protein, 18 aa, synthetic construct
KTINGSGSPHSKAQVGHT

SEQ ID NO: 3486 - protein, 18 aa, synthetic construct
KNAIGSGSPHSKAQNQQT

SEQ ID NO: 3487 - protein, 18 aa, synthetic construct
KAENGSGSPHSKAQNQQT

SEQ ID NO: 3488 - protein, 18 aa, synthetic construct
KTINGSGSPHSKAQRDIT

SEQ ID NO: 3489 - protein, 18 aa, synthetic construct
KTINGSGSPHSKAQMPNT

SEQ ID NO: 3490 - protein, 18 aa, synthetic construct
KTVNGSGSPHSKSQNQQT

SEQ ID NO: 3491 - protein, 18 aa, synthetic construct
KTINGSGSPHSKARGLQT

SEQ ID NO: 3492 - protein, 18 aa, synthetic construct
KTELGSGSPHSKAQNQQT

SEQ ID NO: 3493 - protein, 18 aa, synthetic construct
KAETGSGSPHSKAQNQQT

SEQ ID NO: 3494 - protein, 18 aa, synthetic construct
KTINGSGSPHSKLQKQQT

SEQ ID NO: 3495 - protein, 18 aa, synthetic construct
KTINGSGSPHSKAPSLQT

SEQ ID NO: 3496 - protein, 18 aa, synthetic construct
KTINGSGSPHSKAQRDQT

SEQ ID NO: 3497 - protein, 18 aa, synthetic construct
KTDVGSGSPHSKAQNQQT

SEQ ID NO: 3498 - protein, 18 aa, synthetic construct
KTINGSGSPHSKNRDQQT

SEQ ID NO: 3499 - protein, 18 aa, synthetic construct
KSINGSGSPHSKAPNLQT

SEQ ID NO: 3500 - protein, 18 aa, synthetic construct
KTINGSGSPHSKAQAKGT

SEQ ID NO: 3501 - protein, 18 aa, synthetic construct
KTVNGSGSPHSKAQDKQT

SEQ ID NO: 3502 - protein, 18 aa, synthetic construct
KTINGSGSPHSKAQSAHT

SEQ ID NO: 3503 - protein, 18 aa, synthetic construct
KTVPTSGSPHSKAQNQQT

SEQ ID NO: 3504 - protein, 18 aa, synthetic construct
KTIDGSGSPHSKSQNHQT

SEQ ID NO: 3505 - protein, 18 aa, synthetic construct
KTDVKSGSPHSKAQNQQT

SEQ ID NO: 3506 - protein, 18 aa, synthetic construct
KAINRSGSPHSKAQDQQT

SEQ ID NO: 3507 - protein, 18 aa, synthetic construct
KTINGSGSPHSKAQSTMT

SEQ ID NO: 3508 - protein, 18 aa, synthetic construct
KTVNASGSPHSKAQNQLT

SEQ ID NO: 3509 - protein, 18 aa, synthetic construct
KTINGSGSPHSKAQREMT

SEQ ID NO: 3510 - protein, 18 aa, synthetic construct
KTVHGSGSPHSKAQSQQT

SEQ ID NO: 3511 - protein, 18 aa, synthetic construct
KTINGSGSPHSKAQYRAT

SEQ ID NO: 3512 - protein, 18 aa, synthetic construct
KTEPMSGSPHSKAQNQQT

SEQ ID NO: 3513 - protein, 18 aa, synthetic construct
KTINGSGSPHSKNQWQQT

SEQ ID NO: 3514 - protein, 18 aa, synthetic construct
KETAGSGSPHSKAQNQQT

SEQ ID NO: 3515 - protein, 18 aa, synthetic construct
KTINGSGSPHSKAQRMNT

SEQ ID NO: 3516 - protein, 18 aa, synthetic construct
KNNLGSGSPHSKAQNQQT

SEQ ID NO: 3517 - protein, 18 aa, synthetic construct
KTINGSGSPHAKAQNHQT

SEQ ID NO: 3518 - protein, 18 aa, synthetic construct
KTINGSGSPHSKAGDSQT

SEQ ID NO: 3519 - protein, 18 aa, synthetic construct
KTINGSGSPHSKLKSQQT

SEQ ID NO: 3520 - protein, 18 aa, synthetic construct
KTINGSGSPHSKAQKIST

SEQ ID NO: 3521 - protein, 18 aa, synthetic construct
KTEYNSGSPHSKAQNQQT

SEQ ID NO: 3522 - protein, 18 aa, synthetic construct
KTINGSGSPHSKAPSMQT

SEQ ID NO: 3523 - protein, 18 aa, synthetic construct
EAINGSGSPHSKAQNQQT

SEQ ID NO: 3524 - protein, 18 aa, synthetic construct
KTINGSGSPHSKASPRQT

SEQ ID NO: 3525 - protein, 18 aa, synthetic construct
KTINGSGSPHSKRMEQQT

SEQ ID NO: 3526 - protein, 18 aa, synthetic construct
KTINGSGSPHSKAQYQNT

SEQ ID NO: 3527 - protein, 18 aa, synthetic construct
KEINGRGSPHSKAQNQQT

SEQ ID NO: 3528 - protein, 18 aa, synthetic construct
KTVNRNGSPHSKAQNQQT

SEQ ID NO: 3529 - protein, 18 aa, synthetic construct
KTINGPGSPHSKAHNQQT

SEQ ID NO: 3530 - protein, 18 aa, synthetic construct
KTSYGNGSPHSKAQNQQT

SEQ ID NO: 3531 - protein, 18 aa, synthetic construct
KSVNGNGSPHSKAQNQQT

SEQ ID NO: 3532 - protein, 18 aa, synthetic construct
KTINGSGSPHGWVQNQQT

SEQ ID NO: 3533 - protein, 18 aa, synthetic construct
KTINGGGSPHSKAQTQQI

SEQ ID NO: 3534 - protein, 18 aa, synthetic construct
KTVHGNGSPHSKAQNQQT

SEQ ID NO: 3535 - protein, 18 aa, synthetic construct
KTINGGGSPHSKAQNQQC

SEQ ID NO: 3536 - protein, 18 aa, synthetic construct
KTIDGGGSPHSKAQNKQT

SEQ ID NO: 3537 - protein, 18 aa, synthetic construct
KTINGGGSPHSKAQNQLI

SEQ ID NO: 3538 - protein, 18 aa, synthetic construct
KNINGGGSPHSKAQNQQT

SEQ ID NO: 3539 - protein, 18 aa, synthetic construct
KTINGGGSPHSKSQNQLT

SEQ ID NO: 3540 - protein, 18 aa, synthetic construct
KTVNGNGSPHSKAQNKQT

SEQ ID NO: 3541 - protein, 18 aa, synthetic construct
KTVNGNGSPHSKAQNQHT

SEQ ID NO: 3542 - protein, 18 aa, synthetic construct
KTINGGGSPHSKALNQQN

SEQ ID NO: 3543 - protein, 18 aa, synthetic construct
KTINGTGSPHSKAQNHQI

SEQ ID NO: 3544 - protein, 18 aa, synthetic construct
KTIIGGGSPHSKAHNQQT

SEQ ID NO: 3545 - protein, 18 aa, synthetic construct
KTINGNGSPHSKAQNPLT

SEQ ID NO: 3546 - protein, 18 aa, synthetic construct
KSIKGNGSPHSKAQNQQT

SEQ ID NO: 3547 - protein, 18 aa, synthetic construct
KTINGGGSPHSKAQSQQI

SEQ ID NO: 3548 - protein, 18 aa, synthetic construct
KTINGSVSPHGKAQNQLT

SEQ ID NO: 3549 - protein, 18 aa, synthetic construct
KTINGIGSPHSKAQNLGT

SEQ ID NO: 3550 - protein, 18 aa, synthetic construct
KTVNGNGSPHSKAQNHQT

SEQ ID NO: 3551 - protein, 18 aa, synthetic construct
KTSNGGGSPHSKAQNLQT

SEQ ID NO: 3552 - protein, 18 aa, synthetic construct
KTINGGGSPHSKSQNQHT

SEQ ID NO: 3553 - protein, 18 aa, synthetic construct
KTVNGGGSPHSKAQSQQT

SEQ ID NO: 3554 - protein, 18 aa, synthetic construct
KTIPIDGSPHSKAQNQQT

SEQ ID NO: 3555 - protein, 18 aa, synthetic construct
KTINGGGSPHSKAQNPPT

SEQ ID NO: 3556 - protein, 18 aa, synthetic construct
KTINGLGSPHSKSQNQQT

SEQ ID NO: 3557 - protein, 18 aa, synthetic construct
KTINGTGSPHSKAQNQQM

SEQ ID NO: 3558 - protein, 18 aa, synthetic construct
KTIRDAGSPHSKAQNQQT

SEQ ID NO: 3559 - protein, 18 aa, synthetic construct
KTVNGGGSPHSKAQNQQS

SEQ ID NO: 3560 - protein, 18 aa, synthetic construct
KTIQDGGSPHSKAQNQQT

SEQ ID NO: 3561 - protein, 18 aa, synthetic construct
KTISGGGSPHSKAQNQQN

SEQ ID NO: 3562 - protein, 18 aa, synthetic construct
KTINGGGSPHSKAQDKQT

SEQ ID NO: 3563 - protein, 18 aa, synthetic construct
KTIIGGGSPHSKAQNPQT

SEQ ID NO: 3564 - protein, 18 aa, synthetic construct
KTINGTGSPHSKAPNQLT

SEQ ID NO: 3565 - protein, 18 aa, synthetic construct
KTFNGGGSPHSKAQYQQT

SEQ ID NO: 3566 - protein, 18 aa, synthetic construct
KTVNGGGSPHSKAQHQQT

SEQ ID NO: 3567 - protein, 18 aa, synthetic construct
KTIPMEGSPHSKAQNQQT

SEQ ID NO: 3568 - protein, 18 aa, synthetic construct
KTVNGGGSPHSKSQNQQT

SEQ ID NO: 3569 - protein, 18 aa, synthetic construct
KTINGGGSPHSKAQNQMT

SEQ ID NO: 3570 - protein, 18 aa, synthetic construct
KTIRENGSPHSKAQNQQT

SEQ ID NO: 3571 - protein, 18 aa, synthetic construct
KTINGSASPHSKAHSQQT

SEQ ID NO: 3572 - protein, 18 aa, synthetic construct
KTNNGGGSPHSKAQNLQT

SEQ ID NO: 3573 - protein, 18 aa, synthetic construct
KSINGGGSPHSKAQYQQT

SEQ ID NO: 3574 - protein, 18 aa, synthetic construct
KTVNGNGSPHSKSQNQQT

SEQ ID NO: 3575 - protein, 18 aa, synthetic construct
KTLNGNGSPHSKAQNLQT

SEQ ID NO: 3576 - protein, 18 aa, synthetic construct
KTINGSGSSHSKAQNQQT

SEQ ID NO: 3577 - protein, 18 aa, synthetic construct
KTVNGGGSPHSKAQNHQT

SEQ ID NO: 3578 - protein, 18 aa, synthetic construct
KTINGGGSPHSKAQYQHT

SEQ ID NO: 3579 - protein, 18 aa, synthetic construct
KTIPKNGSPHSKAQNQQT

SEQ ID NO: 3580 - protein, 18 aa, synthetic construct
KTINKEGSPHSKAQNQQT

SEQ ID NO: 3581 - protein, 18 aa, synthetic construct
KTVNGGGSPHSKAQNLQT

SEQ ID NO: 3582 - protein, 18 aa, synthetic construct
KTIPAIGSPHSKAQNQQT

SEQ ID NO: 3583 - protein, 18 aa, synthetic construct
KTINGGGSPHSKAQNPQA

SEQ ID NO: 3584 - protein, 18 aa, synthetic construct
KTINGNGSPHSKSQNQHT

SEQ ID NO: 3585 - protein, 18 aa, synthetic construct
KTINGGGSPHSKSQNRQT

SEQ ID NO: 3586 - protein, 18 aa, synthetic construct
KTINGGGSPHSKAQRQQT

SEQ ID NO: 3587 - protein, 18 aa, synthetic construct
KTIIKNGSPHSKAQNQQT

SEQ ID NO: 3588 - protein, 18 aa, synthetic construct
KTINGSGSPHSYHVNQQT

SEQ ID NO: 3589 - protein, 18 aa, synthetic construct
KTERVSGSPHSKAQNQQT

SEQ ID NO: 3590 - skipped

SEQ ID NO: 3591 - protein, 18 aa, synthetic construct
KTFNRSGSPHSKAQNQQI

SEQ ID NO: 3592 - protein, 18 aa, synthetic construct
KTINGSGSPHTKAQNPPT

SEQ ID NO: 3593 - protein, 18 aa, synthetic construct
KSLNGSGSPHTKAQNQQT

SEQ ID NO: 3594 - protein, 18 aa, synthetic construct
KTENKSGSPHSKAQNQQT

SEQ ID NO: 3595 - protein, 18 aa, synthetic construct
KTDKGSGSPHSKAQNQQT

SEQ ID NO: 3596 - protein, 18 aa, synthetic construct
KTSNASGSPHSKAQHQQT

SEQ ID NO: 3597 - protein, 18 aa, synthetic construct
KTINASGSPHSKAINQQT

SEQ ID NO: 3598 - protein, 18 aa, synthetic construct
KTINGSGSPHSKAPNQQH

SEQ ID NO: 3599 - protein, 18 aa, synthetic construct
KTVNASGSPHSKAQNHQT

SEQ ID NO: 3600 - protein, 18 aa, synthetic construct
KTIDGSGSPHSKAENRQT

SEQ ID NO: 3601 - protein, 18 aa, synthetic construct
KTIKGSGSPHSKVQDQQT

SEQ ID NO: 3602 - protein, 18 aa, synthetic construct
KAINGSGSPHSKAQTQQA

SEQ ID NO: 3603 - protein, 18 aa, synthetic construct
KTEAKSGSPHSKAQNQQT

SEQ ID NO: 3604 - protein, 18 aa, synthetic construct
KTIPGSGSPHSKAQNLQT

SEQ ID NO: 3605 - protein, 18 aa, synthetic construct
KTIHGSGSPHSKAQNQAT

SEQ ID NO: 3606 - protein, 18 aa, synthetic construct
KAINGHDSPHKSGQIRQT

SEQ ID NO: 3607 - protein, 18 aa, synthetic construct
KTINGHDSPHKIGQNQHA

SEQ ID NO: 3608 - protein, 18 aa, synthetic construct
KAINGYDSPHKSGQKQQT

SEQ ID NO: 3609 - protein, 18 aa, synthetic construct
KTESGHDSPHKSGQNQQT

SEQ ID NO: 3610 - protein, 18 aa, synthetic construct
KTINGHDSPHKSGQSVQT

SEQ ID NO: 3611 - protein, 18 aa, synthetic construct
TTINGHDSPHKSGQNQQT

SEQ ID NO: 3612 - protein, 18 aa, synthetic construct
KTINGHESPHKSGRSQQT

SEQ ID NO: 3613 - protein, 18 aa, synthetic construct
KTINGHDSPHKSGQNKLE

SEQ ID NO: 3614 - protein, 18 aa, synthetic construct
KTINGHDSPHKTGQNQQK

SEQ ID NO: 3615 - protein, 18 aa, synthetic construct
KAINGHDNPHKSGQNQQT

SEQ ID NO: 3616 - protein, 18 aa, synthetic construct
KTINGQDSPHKSGQHQQA

SEQ ID NO: 3617 - protein, 18 aa, synthetic construct
KSINGHDSPHKSGQIQHT

SEQ ID NO: 3618 - protein, 18 aa, synthetic construct
KAINGHDSPHKSGPRQQT

SEQ ID NO: 3619 - protein, 18 aa, synthetic construct
KTVNGHDSPHKSGHTQQT

SEQ ID NO: 3620 - protein, 18 aa, synthetic construct
KSINGHDSPHKSGQRQHT

SEQ ID NO: 3621 - protein, 18 aa, synthetic construct
KAINGHDSPHKSAQSQQT

SEQ ID NO: 3622 - protein, 18 aa, synthetic construct
KSIYGHESPHKSGQNQQS

SEQ ID NO: 3623 - protein, 18 aa, synthetic construct
KTVNGHDSPHKSLQNQQT

SEQ ID NO: 3624 - protein, 18 aa, synthetic construct
KTSNGYDSPHKSGQKQQT

SEQ ID NO: 3625 - protein, 18 aa, synthetic construct
KTVNGHDSPHKSGRNQET

SEQ ID NO: 3626 - protein, 18 aa, synthetic construct
KTTNGHDSPHKSGQTQLT

SEQ ID NO: 3627 - protein, 18 aa, synthetic construct
KAINGHDSPHKSEKNQQT

SEQ ID NO: 3628 - protein, 18 aa, synthetic construct
KIINGRDSPHKSGQDQQT

SEQ ID NO: 3629 - protein, 18 aa, synthetic construct
KTISGHDSPHKTGHNQQT

SEQ ID NO: 3630 - protein, 18 aa, synthetic construct
KTVNAHDSPHKSGQNQLT

SEQ ID NO: 3631 - protein, 18 aa, synthetic construct
KSINGYDSPHKSGQTQQT

SEQ ID NO: 3632 - protein, 18 aa, synthetic construct
KTINGHESPHKSGQTQQI

SEQ ID NO: 3633 - protein, 18 aa, synthetic construct
KTINGHDSPHKSGQSKQA

SEQ ID NO: 3634 - protein, 18 aa, synthetic construct
KAIIGHESPHKSGQNQQT

SEQ ID NO: 3635 - protein, 18 aa, synthetic construct
KTINGHDSPHKTGQNQPP

SEQ ID NO: 3636 - protein, 18 aa, synthetic construct
KAINGHDSPHKSGQSPQT

SEQ ID NO: 3637 - protein, 18 aa, synthetic construct
KTIKGNDSPHKSVQNQQT

SEQ ID NO: 3638 - protein, 18 aa, synthetic construct
KTEFGHDSPHKSGQNQQT

SEQ ID NO: 3639 - protein, 18 aa, synthetic construct
KTINGHDSPHKSAQNYQT

SEQ ID NO: 3640 - protein, 18 aa, synthetic construct
KTINAHDSPHKIGQNHQT

SEQ ID NO: 3641 - protein, 18 aa, synthetic construct
KTINGHESPHKSAQNRQT

SEQ ID NO: 3642 - protein, 18 aa, synthetic construct
KTTNGHDSPHKSGQNQQG

SEQ ID NO: 3643 - protein, 18 aa, synthetic construct
KTIKGQDSPHKIGQNQQT

SEQ ID NO: 3644 - protein, 18 aa, synthetic construct
KTVNGHDSPHKSGQNHLT

SEQ ID NO: 3645 - protein, 18 aa, synthetic construct
KSINGHDSPHKSGQYQHT

SEQ ID NO: 3646 - protein, 18 aa, synthetic construct
KTINGNDSPHKSVQNHQT

SEQ ID NO: 3647 - protein, 18 aa, synthetic construct
KTITGHDSPHKSGQNQWT

SEQ ID NO: 3648 - protein, 18 aa, synthetic construct
KTNNGHDSPHKSVQNQHT

SEQ ID NO: 3649 - protein, 18 aa, synthetic construct
KTIDGHDSPHKSGQNQHA

SEQ ID NO: 3650 - protein, 18 aa, synthetic construct
KTVNGHDSPHKSGQTRQT

SEQ ID NO: 3651 - protein, 18 aa, synthetic construct
KTVNGHDSPHKSGQNLHT

SEQ ID NO: 3652 - protein, 18 aa, synthetic construct
KAISGHDSPHKSGLNQQT

SEQ ID NO: 3653 - protein, 18 aa, synthetic construct
KAINGHDSPHKSAQNQET

SEQ ID NO: 3654 - protein, 18 aa, synthetic construct
KTITGHDSPHKSGQHLQT

SEQ ID NO: 3655 - protein, 18 aa, synthetic construct
KTINGHDSPHKSRLNQPT

SEQ ID NO: 3656 - protein, 18 aa, synthetic construct
KTVDGHDSPHKSGQKQQT

SEQ ID NO: 3657 - protein, 18 aa, synthetic construct
KTINGQDSPHKSGQNQDT

SEQ ID NO: 3658 - protein, 18 aa, synthetic construct
KTIEGHDSPHKSGRNQQT

SEQ ID NO: 3659 - protein, 18 aa, synthetic construct
KTTNGHDSPHKSGQNLLT

SEQ ID NO: 3660 - protein, 18 aa, synthetic construct
KTINGHDSPHKSGQLVIT

SEQ ID NO: 3661 - protein, 18 aa, synthetic construct
KTVNGHDSPHKSRQSQQT

SEQ ID NO: 3662 - protein, 18 aa, synthetic construct
KTINGHDSPHKSGRTQET

SEQ ID NO: 3663 - protein, 18 aa, synthetic construct
KTINGHDSPHKSVQTHQT

SEQ ID NO: 3664 - protein, 18 aa, synthetic construct
KTSNGHDSPHKSGQNQPA

SEQ ID NO: 3665 - protein, 18 aa, synthetic construct
KTEGKHDSPHKSGQNQQT

SEQ ID NO: 3666 - protein, 18 aa, synthetic construct
KVINGHDSPHKSGQTQQT

SEQ ID NO: 3667 - protein, 18 aa, synthetic construct
KTINGPDSPHKIGQNQQS

SEQ ID NO: 3668 - protein, 18 aa, synthetic construct
KAVNGHDSPHKSVQNQQT

SEQ ID NO: 3669 - protein, 18 aa, synthetic construct
KTINGHDSPHKSRQDQHT

SEQ ID NO: 3670 - protein, 18 aa, synthetic construct
KAINGPDSPHKSGQKQQT

SEQ ID NO: 3671 - protein, 18 aa, synthetic construct
KTINGHDSPHKSRQSQHT

SEQ ID NO: 3672 - protein, 18 aa, synthetic construct
KTIYGHDSPHKSVQNQLT

SEQ ID NO: 3673 - protein, 18 aa, synthetic construct
KTVNGHDSPHKSGQNLLT

SEQ ID NO: 3674 - protein, 18 aa, synthetic construct
KTESAHDSPHKSGQNQQT

SEQ ID NO: 3675 - protein, 18 aa, synthetic construct
KTTNGQDSPHKSGQNQQS

SEQ ID NO: 3676 - protein, 18 aa, synthetic construct
KTIDGHDSPHKSGRNQQI

SEQ ID NO: 3677 - protein, 18 aa, synthetic construct
KTINGYDSPHKSGQYQHT

SEQ ID NO: 3678 - protein, 18 aa, synthetic construct
KTDNGHDSPHKSRQNQQT

SEQ ID NO: 3679 - protein, 18 aa, synthetic construct
KTINGHDSPHKSWVRQQT

SEQ ID NO: 3680 - protein, 18 aa, synthetic construct
KTINGHESPHKSGQNQHS

SEQ ID NO: 3681 - protein, 18 aa, synthetic construct
KTVNGHDSPHKIGHNQQT

SEQ ID NO: 3682 - protein, 18 aa, synthetic construct
KTCNGHDSPHKSGRNQQT

SEQ ID NO: 3683 - protein, 18 aa, synthetic construct
KNVVGHDSPHKSGQNQQT

SEQ ID NO: 3684 - protein, 18 aa, synthetic construct
KTELWHDSPHKSGQNQQT

SEQ ID NO: 3685 - protein, 18 aa, synthetic construct
KTELRHDSPHKSGQNQQT

SEQ ID NO: 3686 - protein, 18 aa, synthetic construct
KTINGHDSPHKSNAWQQT

SEQ ID NO: 3687 - protein, 18 aa, synthetic construct
KTDAGHDSPHKSGQNQQT

SEQ ID NO: 3688 - protein, 18 aa, synthetic construct
KTEVGHDSPHKSGQNQQT

SEQ ID NO: 3689 - protein, 18 aa, synthetic construct
KTESRHDSPHKSGQNQQT

SEQ ID NO: 3690 - protein, 18 aa, synthetic construct
KSELGHDSPHKSGQNQQT

SEQ ID NO: 3691 - protein, 18 aa, synthetic construct
KTINGHDSPHKSGQSVPT

SEQ ID NO: 3692 - protein, 18 aa, synthetic construct
KTINGHESPHKSGQNIQP

SEQ ID NO: 3693 - protein, 18 aa, synthetic construct
KTEMKHDSPHKSGQNQQT

SEQ ID NO: 3694 - protein, 18 aa, synthetic construct
KTINGHDSPHKSVQNHLN

SEQ ID NO: 3695 - protein, 18 aa, synthetic construct
KTINGHDSPHKIGLDQQT

SEQ ID NO: 3696 - protein, 18 aa, synthetic construct
KTINGHDSPHKRGPDQQS

SEQ ID NO: 3697 - protein, 18 aa, synthetic construct
KTIKGHDSPHKSGESQQT

SEQ ID NO: 3698 - protein, 18 aa, synthetic construct
KTEGWHDSPHKSGQNQQT

SEQ ID NO: 3699 - protein, 18 aa, synthetic construct
KTINGHDSPHKHGQNHQT

SEQ ID NO: 3700 - protein, 18 aa, synthetic construct
KTEQLHDSPHKSGQNQQT

SEQ ID NO: 3701 - protein, 18 aa, synthetic construct
KTIIGHDSPHKSGQYQHT

SEQ ID NO: 3702 - protein, 18 aa, synthetic construct
KTSNGHDSPHKSVQNKQT

SEQ ID NO: 3703 - protein, 18 aa, synthetic construct
KIVNGQVSPHKSGQNQQT

SEQ ID NO: 3704 - protein, 18 aa, synthetic construct
KTVNGHDSPHKSGQRQLT

SEQ ID NO: 3705 - protein, 18 aa, synthetic construct
KTVNGHDSPHKIGQNQLT

SEQ ID NO: 3706 - protein, 18 aa, synthetic construct
KTINGHDSPHKSGQIIVT

SEQ ID NO: 3707 - protein, 18 aa, synthetic construct
KTEKIHDSPHKSGQNQQT

SEQ ID NO: 3708 - protein, 18 aa, synthetic construct
KTENAHDSPHKSGQNQQT

SEQ ID NO: 3709 - protein, 18 aa, synthetic construct
KIGNGHESPHKSGQNQQT

SEQ ID NO: 3710 - protein, 18 aa, synthetic construct
KEVMGHDSPHKSGQNQQT

SEQ ID NO: 3711 - protein, 18 aa, synthetic construct
KTEVKHDSPHKSGQNQQT

SEQ ID NO: 3712 - protein, 18 aa, synthetic construct
KTINGYDSPHKSGQKQST

SEQ ID NO: 3713 - protein, 18 aa, synthetic construct
KYQVGHDSPHKSGQNQQT

SEQ ID NO: 3714 - protein, 18 aa, synthetic construct
KTEAMHDSPHKSGQNQQT

SEQ ID NO: 3715 - protein, 18 aa, synthetic construct
KTIKGDDSPHKSVQNQQT

SEQ ID NO: 3716 - protein, 18 aa, synthetic construct
KTINGHDSPHKSVQSHQT

SEQ ID NO: 3717 - protein, 18 aa, synthetic construct
KTINGHDSPHKSGQFVVT

SEQ ID NO: 3718 - protein, 18 aa, synthetic construct
KTVNGHDSPHKSRQNLQT

SEQ ID NO: 3719 - protein, 18 aa, synthetic construct
KATNGHNSPHKSGQNQET

SEQ ID NO: 3720 - protein, 18 aa, synthetic construct
KAINGHDSPHKSAQNQQI

SEQ ID NO: 3721 - protein, 18 aa, synthetic construct
KTEHGHDSPHKSGQNQQT

SEQ ID NO: 3722 - protein, 18 aa, synthetic construct
KTVENHDSPHKSGQNQQT

SEQ ID NO: 3723 - protein, 18 aa, synthetic construct
KTIYGHDSPHKSGQSQPT

SEQ ID NO: 3724 - protein, 18 aa, synthetic construct
KTISGHESPHKSGQNEQT

SEQ ID NO: 3725 - protein, 18 aa, synthetic construct
KAIIGHDSPHKSAQNQQT

SEQ ID NO: 3726 - protein, 18 aa, synthetic construct
KAIDGHDSPHKSGQNQLT

SEQ ID NO: 3727 - protein, 18 aa, synthetic construct
KTIMGHDSPHKSVQNQQT

SEQ ID NO: 3728 - protein, 18 aa, synthetic construct
KEVGGHDSPHKSGQNQQT

SEQ ID NO: 3729 - protein, 18 aa, synthetic construct
KTINGHDSPHKSAQNLLT

SEQ ID NO: 3730 - protein, 18 aa, synthetic construct
KTEFTHDSPHKSGQNQQT

SEQ ID NO: 3731 - protein, 18 aa, synthetic construct
KSEMGHDSPHKSGQNQQT

SEQ ID NO: 3732 - protein, 18 aa, synthetic construct
KAQQGHDSPHKSGQNQQT

SEQ ID NO: 3733 - protein, 18 aa, synthetic construct
KTEVMHDSPHKSGQNQQT

SEQ ID NO: 3734 - protein, 18 aa, synthetic construct
KAINGHDSPHKSGQSLQT

SEQ ID NO: 3735 - protein, 18 aa, synthetic construct
KCGEGHDSPHKSGQNQQT

SEQ ID NO: 3736 - protein, 18 aa, synthetic construct
KTVNGHDSPHKSAQNHQT

SEQ ID NO: 3737 - protein, 18 aa, synthetic construct
KTVNGHDSPHKSGQTQLT

SEQ ID NO: 3738 - protein, 18 aa, synthetic construct
KTNNGHDSPHKSGRNRQT

SEQ ID NO: 3739 - protein, 18 aa, synthetic construct
KTCNEHDSPHKSGQNQQT

SEQ ID NO: 3740 - protein, 18 aa, synthetic construct
KTINGHDSPHKYGQNEQT

SEQ ID NO: 3741 - protein, 18 aa, synthetic construct
KASNRHDSPHKSGHNQQT

SEQ ID NO: 3742 - protein, 18 aa, synthetic construct
KTETKHDSPHKSGQNQQT

SEQ ID NO: 3743 - protein, 18 aa, synthetic construct
KSINGHDSPHKSQQNQQT

SEQ ID NO: 3744 - protein, 18 aa, synthetic construct
KTIGGHDSPHKSGQNQQI

SEQ ID NO: 3745 - protein, 18 aa, synthetic construct
KTDPQHDSPHKSGQNQQT

SEQ ID NO: 3746 - protein, 18 aa, synthetic construct
KTINRHDSPHKIVQNQQT

SEQ ID NO: 3747 - protein, 18 aa, synthetic construct
KTEQYHDSPHKSGQNQQT

SEQ ID NO: 3748 - protein, 18 aa, synthetic construct
KTINGHDSPHKSVQSKQT

SEQ ID NO: 3749 - protein, 18 aa, synthetic construct
KELVGHDSPHKSGQNQQT

SEQ ID NO: 3750 - protein, 18 aa, synthetic construct
KTENRHDSPHKSGQNQQT

SEQ ID NO: 3751 - protein, 18 aa, synthetic construct
KELMGHDSPHKSGQNQQT

SEQ ID NO: 3752 - protein, 18 aa, synthetic construct
KTINGNDSPHKIGHNQQT

SEQ ID NO: 3753 - protein, 18 aa, synthetic construct
KTEGHHDSPHKSGQNQQT

SEQ ID NO: 3754 - protein, 18 aa, synthetic construct
KTEGYHDSPHKSGQNQQT

SEQ ID NO: 3755 - protein, 18 aa, synthetic construct
KTVNGHDSPHKSGQTQQI

SEQ ID NO: 3756 - protein, 18 aa, synthetic construct
KTINGQDSPHKSGQNPLT

SEQ ID NO: 3757 - protein, 18 aa, synthetic construct
KTINGHDSPHKSGRDQKT

SEQ ID NO: 3758 - protein, 18 aa, synthetic construct
KTINGHDSPHKSVHNQQN

SEQ ID NO: 3759 - protein, 18 aa, synthetic construct
KTINGHDSPHKSGQWKRT

SEQ ID NO: 3760 - protein, 18 aa, synthetic construct
KNEIGHDSPHKSGQNQQT

SEQ ID NO: 3761 - protein, 18 aa, synthetic construct
KAINGHDSPHKSGQSQQI

SEQ ID NO: 3762 - protein, 18 aa, synthetic construct
KIINGHDSPHKSRQAQQT

SEQ ID NO: 3763 - protein, 18 aa, synthetic construct
KTPNGHDSPHKSGQNQQI

SEQ ID NO: 3764 - protein, 18 aa, synthetic construct
KITNGHDSPHKSGQTQQT

SEQ ID NO: 3765 - protein, 18 aa, synthetic construct
KTINGHDSPHKSVQNHQI

SEQ ID NO: 3766 - protein, 18 aa, synthetic construct
KTINGHDSPHKSKQNQQA

SEQ ID NO: 3767 - protein, 18 aa, synthetic construct
KTINGHDSPHKSAQNQLN

SEQ ID NO: 3768 - protein, 18 aa, synthetic construct
KTDITHDSPHKSGQNQQT

SEQ ID NO: 3769 - protein, 18 aa, synthetic construct
KTVNGHDSPHKSGQTQPT

SEQ ID NO: 3770 - protein, 18 aa, synthetic construct
KTEKFHDSPHKSGQNQQT

SEQ ID NO: 3771 - protein, 18 aa, synthetic construct
KTDQGHDSPHKSGQNQQT

SEQ ID NO: 3772 - protein, 18 aa, synthetic construct
KTINGHDSPHKLWINQQT

SEQ ID NO: 3773 - protein, 18 aa, synthetic construct
KGINGPDSPHKSGQNQQT

SEQ ID NO: 3774 - protein, 18 aa, synthetic construct
KSEIGHDSPHKSGQNQQT

SEQ ID NO: 3775 - protein, 18 aa, synthetic construct
KTINGHDSPHKSVQKQLT

SEQ ID NO: 3776 - protein, 18 aa, synthetic construct
KTVNGHDSPHKSGRNQLA

SEQ ID NO: 3777 - protein, 18 aa, synthetic construct
KTNNVHDSPHKSGQNQQS

SEQ ID NO: 3778 - protein, 18 aa, synthetic construct
KSEKGHDSPHKSGQNQQT

SEQ ID NO: 3779 - protein, 18 aa, synthetic construct
KWSAGHDSPHKSGQNQQT

SEQ ID NO: 3780 - protein, 18 aa, synthetic construct
KELAGHDSPHKSGQNQQT

SEQ ID NO: 3781 - protein, 18 aa, synthetic construct
KTINGHDSPHKMGRNQQS

SEQ ID NO: 3782 - protein, 18 aa, synthetic construct
KTDQAHDSPHKSGQNQQT

SEQ ID NO: 3783 - protein, 18 aa, synthetic construct
KTETQHDSPHKSGQNQQT

SEQ ID NO: 3784 - protein, 18 aa, synthetic construct
KTEMTHDSPHKSGQNQQT

SEQ ID NO: 3785 - protein, 18 aa, synthetic construct
KTINGHDSPHKSGISIQT

SEQ ID NO: 3786 - protein, 18 aa, synthetic construct
KTDAVHDSPHKSGQNQQT

SEQ ID NO: 3787 - protein, 18 aa, synthetic construct
KTSNGHDSPHKSVQNLQT

SEQ ID NO: 3788 - protein, 18 aa, synthetic construct
KTEKYHDSPHKSGQNQQT

SEQ ID NO: 3789 - protein, 18 aa, synthetic construct
KQTQGHDSPHKSGQNQQT

SEQ ID NO: 3790 - protein, 18 aa, synthetic construct
KTINGHDSPHKMAHNQQT

SEQ ID NO: 3791 - protein, 18 aa, synthetic construct
KTINGHDSPHKHGQNQQN

SEQ ID NO: 3792 - protein, 18 aa, synthetic construct
KGADGHDSPHKSGQNQQT

SEQ ID NO: 3793 - protein, 18 aa, synthetic construct
KVGEGHDSPHKSGQNQQT

SEQ ID NO: 3794 - protein, 18 aa, synthetic construct
KANEGHDSPHKSGQNQQT

SEQ ID NO: 3795 - protein, 18 aa, synthetic construct
KTDTMHDSPHKSGQNQQT

SEQ ID NO: 3796 - protein, 18 aa, synthetic construct
KTINGHDSPHKSVQSQQS

SEQ ID NO: 3797 - protein, 18 aa, synthetic construct
KTCIAHDSPHKSGQNQQT

SEQ ID NO: 3798 - protein, 18 aa, synthetic construct
KTINGHDSPHKSGQTVCT

SEQ ID NO: 3799 - protein, 18 aa, synthetic construct
KELRGHDSPHKSGQNQQT

SEQ ID NO: 3800 - protein, 18 aa, synthetic construct
KCQIGHDSPHKSGQNQQT

SEQ ID NO: 3801 - protein, 18 aa, synthetic construct
KGVMGHDSPHKSGQNQQT

SEQ ID NO: 3802 - protein, 18 aa, synthetic construct
KACDGHDSPHKSGQNQQT

SEQ ID NO: 3803 - protein, 18 aa, synthetic construct
KTINGQDSPHKSGQYQQI

SEQ ID NO: 3804 - protein, 18 aa, synthetic construct
KTINGHDSPHKSGQQIMT

SEQ ID NO: 3805 - protein, 18 aa, synthetic construct
KTINGHDSPHKSRQNEQS

SEQ ID NO: 3806 - protein, 18 aa, synthetic construct
KASNGHDSPHKSGLNHQT

SEQ ID NO: 3807 - protein, 18 aa, synthetic construct
KTVNGHDSPHKSGQSQPT

SEQ ID NO: 3808 - protein, 18 aa, synthetic construct
KNELGHDSPHKSGQNQQT

SEQ ID NO: 3809 - protein, 18 aa, synthetic construct
KTETFHDSPHKSGQNQQT

SEQ ID NO: 3810 - protein, 18 aa, synthetic construct
KAAEGHDSPHKSGQNQQT

SEQ ID NO: 3811 - protein, 18 aa, synthetic construct
KGQNGHDSPHKSGQNQQT

SEQ ID NO: 3812 - protein, 18 aa, synthetic construct
KNEFGHDSPHKSGQNQQT

SEQ ID NO: 3813 - protein, 18 aa, synthetic construct
KTSIGYDSPHKSGQNQQT

SEQ ID NO: 3814 - protein, 18 aa, synthetic construct
KTDNGHDSPHKSGQNLQT

SEQ ID NO: 3815 - protein, 18 aa, synthetic construct
KTEGQHDSPHKSGQNQQT

SEQ ID NO: 3816 - protein, 18 aa, synthetic construct
KTITGHDSPHKSRQDQQT

SEQ ID NO: 3817 - protein, 18 aa, synthetic construct
KAEHGHDSPHKSGQNQQT

SEQ ID NO: 3818 - protein, 18 aa, synthetic construct
KTINGDDSPHKSGQKQLT

SEQ ID NO: 3819 - protein, 18 aa, synthetic construct
KCDQGHDSPHKSGQNQQT

SEQ ID NO: 3820 - protein, 18 aa, synthetic construct
KEILGHDSPHKSGQNQQT

SEQ ID NO: 3821 - protein, 18 aa, synthetic construct
KTERNHDSPHKSGQNQQT

SEQ ID NO: 3822 - protein, 18 aa, synthetic construct
KAINGDDSPHKSGHNQQT

SEQ ID NO: 3823 - protein, 18 aa, synthetic construct
KTSNGHNSPHKSGQNQET

SEQ ID NO: 3824 - protein, 18 aa, synthetic construct
KTINGHDSPHKSGQMIHT

SEQ ID NO: 3825 - protein, 18 aa, synthetic construct
KNAIGHDSPHKSGQNQQT

SEQ ID NO: 3826 - protein, 18 aa, synthetic construct
KTDKFHDSPHKSGQNQQT

SEQ ID NO: 3827 - protein, 18 aa, synthetic construct
KTEGFHDSPHKSGQNQQT

SEQ ID NO: 3828 - protein, 18 aa, synthetic construct
KVINGHDSPHKSGRNHQS

SEQ ID NO: 3829 - protein, 18 aa, synthetic construct
KTITGHDSPHKSVQNRQT

SEQ ID NO: 3830 - protein, 18 aa, synthetic construct
KTPDMHDSPHKSGQNQQT

SEQ ID NO: 3831 - protein, 18 aa, synthetic construct
KTINGHDSPHKSGQKMNT

SEQ ID NO: 3832 - protein, 18 aa, synthetic construct
KTELQHDSPHKSGQNQQT

SEQ ID NO: 3833 - protein, 18 aa, synthetic construct
KTIHGHDSPHKSGQSQQN

SEQ ID NO: 3834 - protein, 18 aa, synthetic construct
KTEIGHDSPHKSGQNQQT

SEQ ID NO: 3835 - protein, 18 aa, synthetic construct
KTINGHDSPHKSGQYQHA

SEQ ID NO: 3836 - protein, 18 aa, synthetic construct
KTELYHDSPHKSGQNQQT

SEQ ID NO: 3837 - protein, 18 aa, synthetic construct
KTINGRGSPHKRGQNQQT

SEQ ID NO: 3838 - protein, 18 aa, synthetic construct
KTINGHGSPHSKAQNPQT

SEQ ID NO: 3839 - protein, 18 aa, synthetic construct
KTFNGSASPHSKALNQQT

SEQ ID NO: 3840 - protein, 18 aa, synthetic construct
KTINGCGSPHASGQNQQT

SEQ ID NO: 3841 - protein, 18 aa, synthetic construct
KTINGNGSPHSKAQNHQA

SEQ ID NO: 3842 - protein, 18 aa, synthetic construct
KTINGMGSPHSKTQNQQT

SEQ ID NO: 3843 - protein, 18 aa, synthetic construct
KTVNGTGSPHSKAQNQLT

SEQ ID NO: 3844 - protein, 18 aa, synthetic construct
KTIHGNGSPHSKAQNQET

SEQ ID NO: 3845 - protein, 18 aa, synthetic construct
KAINGNGSPHKRGQNQQT

SEQ ID NO: 3846 - protein, 18 aa, synthetic construct
KTINGNGSPHSKAPNLQT

SEQ ID NO: 3847 - protein, 18 aa, synthetic construct
KTIKGGGSPHSKAQDQQT

SEQ ID NO: 3848 - protein, 18 aa, synthetic construct
KTINGHPSPHWKGQNQQT

SEQ ID NO: 3849 - protein, 18 aa, synthetic construct
KTINGSGSPHIVWQNQQT

SEQ ID NO: 3850 - protein, 18 aa, synthetic construct
KTINGSGSPHSKYFMQQT

SEQ ID NO: 3851 - protein, 18 aa, synthetic construct
KTINGSGSPHSKARQRQT

SEQ ID NO: 3852 - protein, 18 aa, synthetic construct
KTINGSGSPHSCHQNQQT

SEQ ID NO: 3853 - protein, 18 aa, synthetic construct
KTINGSGSPHFPWQNQQT

SEQ ID NO: 3854 - protein, 18 aa, synthetic construct
KTINGSGSPHSKIRRQQT

SEQ ID NO: 3855 - protein, 18 aa, synthetic construct
KTINGSGSPHVYYQNQQT

SEQ ID NO: 3856 - protein, 18 aa, synthetic construct
KTINGSGSPHSLYWNQQT

SEQ ID NO: 3857 - protein, 18 aa, synthetic construct
KTINGSGSPHSKPKRQQT

SEQ ID NO: 3858 - protein, 18 aa, synthetic construct
KPRWGSGSPHSKAQNQQT

SEQ ID NO: 3859 - protein, 18 aa, synthetic construct
KTINGSGSPHSKAFSWQT

SEQ ID NO: 3860 - protein, 18 aa, synthetic construct
KTINGSGSPHSRFWNQQT

SEQ ID NO: 3861 - protein, 18 aa, synthetic construct
KTINGSGSPHSKAQCLKT

SEQ ID NO: 3862 - protein, 18 aa, synthetic construct
KTINGSGSPHSRMRNQQT

SEQ ID NO: 3863 - protein, 18 aa, synthetic construct
KTINGSGSPHSVKKNQQT

SEQ ID NO: 3864 - protein, 18 aa, synthetic construct
KTINGSGSPHSWAPNQQT

SEQ ID NO: 3865 - protein, 18 aa, synthetic construct
KTINGSGSPHSLWKNQQT

SEQ ID NO: 3866 - protein, 18 aa, synthetic construct
KTINGSGSPHSKARWQQT

SEQ ID NO: 3867 - protein, 18 aa, synthetic construct
KTINGSGSPHSFRPNQQT

SEQ ID NO: 3868 - protein, 18 aa, synthetic construct
KTINGSGSPHSKKVFQQT

SEQ ID NO: 3869 - protein, 18 aa, synthetic construct
KTINGSGSPHSYAFNQQT

SEQ ID NO: 3870 - protein, 18 aa, synthetic construct
KTINGSGSPHSKACSRQT

SEQ ID NO: 3871 - protein, 18 aa, synthetic construct
KYSAGSGSPHSKAQNQQT

SEQ ID NO: 3872 - protein, 18 aa, synthetic construct
KTINGSGSPHSKRLWQQT

SEQ ID NO: 3873 - protein, 18 aa, synthetic construct
KTINGSGSPHSCSRNQQT

SEQ ID NO: 3874 - protein, 18 aa, synthetic construct
KTINGSGSPHSRCPNQQT

SEQ ID NO: 3875 - protein, 18 aa, synthetic construct
KTINGSGSPHSGACNQQT

SEQ ID NO: 3876 - protein, 18 aa, synthetic construct
KYYTGSGSPHSKAQNQQT

SEQ ID NO: 3877 - protein, 18 aa, synthetic construct
KTINGSGSPHSKFRQQQT

SEQ ID NO: 3878 - protein, 18 aa, synthetic construct
KTINGSGSPHSFPFNQQT

SEQ ID NO: 3879 - protein, 18 aa, synthetic construct
KTINGSGSPHSFFGNQQT

SEQ ID NO: 3880 - protein, 18 aa, synthetic construct
KTINGSGSPHSMCQNQQT

SEQ ID NO: 3881 - protein, 18 aa, synthetic construct
KTINGSGSPHSKLFWQQT

SEQ ID NO: 3882 - protein, 18 aa, synthetic construct
KTINGSGSPHSKTRKQQT

SEQ ID NO: 3883 - protein, 18 aa, synthetic construct
KTINGSGSPHSGKRNQQT

SEQ ID NO: 3884 - protein, 18 aa, synthetic construct
KTINGSGSPHSKAQNFKR

SEQ ID NO: 3885 - protein, 18 aa, synthetic construct
KTINGSGSPHFYRQNQQT

SEQ ID NO: 3886 - protein, 18 aa, synthetic construct
KTINGSGSPHCRVQNQQT

SEQ ID NO: 3887 - protein, 18 aa, synthetic construct
KTINGSGSPHYGIQNQQT

SEQ ID NO: 3888 - protein, 18 aa, synthetic construct
KTINGSGSPHSKAQRFKT

SEQ ID NO: 3889 - protein, 18 aa, synthetic construct
KTINGSGSPHVNCQNQQT

SEQ ID NO: 3890 - protein, 18 aa, synthetic construct
KTINGSGSPHSKPFRQQT

SEQ ID NO: 3891 - protein, 18 aa, synthetic construct
KTINGSGSPHSLAWNQQT

SEQ ID NO: 3892 - protein, 18 aa, synthetic construct
KTINGSGSPHSKRSYQQT

SEQ ID NO: 3893 - protein, 18 aa, synthetic construct
KTINGSGSPHWSYQNQQT

SEQ ID NO: 3894 - protein, 18 aa, synthetic construct
KTINGSGSPHRWLQNQQT

SEQ ID NO: 3895 - protein, 18 aa, synthetic construct
KTINGSGSPHPSCQNQQT

SEQ ID NO: 3896 - protein, 18 aa, synthetic construct
KTINGSGSPHSSWLNQQT

SEQ ID NO: 3897 - protein, 18 aa, synthetic construct
KPRFGSGSPHSKAQNQQT

SEQ ID NO: 3898 - protein, 18 aa, synthetic construct
KWLTGSGSPHSKAQNQQT

SEQ ID NO: 3899 - protein, 18 aa, synthetic construct
KTINGSGSPHSKRRAQQT

SEQ ID NO: 3900 - protein, 18 aa, synthetic construct
KTINGSGSPHSKAQTCRT

SEQ ID NO: 3901 - protein, 18 aa, synthetic construct
KTINGSGSPHSKGCTQQT

SEQ ID NO: 3902 - protein, 18 aa, synthetic construct
KTINGSGSPHVPWQNQQT

SEQ ID NO: 3903 - protein, 18 aa, synthetic construct
KTINGSGSPHSKRYTQQT

SEQ ID NO: 3904 - protein, 18 aa, synthetic construct
KTINGSGSPHSGCQNQQT

SEQ ID NO: 3905 - protein, 18 aa, synthetic construct
KTINGSGSPHSFTPNQQT

SEQ ID NO: 3906 - protein, 18 aa, synthetic construct
KTINGSGSPHSTTCNQQT

SEQ ID NO: 3907 - protein, 18 aa, synthetic construct
KTINGSGSPHSKARMYQT

SEQ ID NO: 3908 - protein, 18 aa, synthetic construct
KTINGSGSPHPKRQNQQT

SEQ ID NO: 3909 - protein, 18 aa, synthetic construct
KTINGSGSPHSKCFLQQT

SEQ ID NO: 3910 - protein, 18 aa, synthetic construct
KTINGSGSPHWVPQNQQT

SEQ ID NO: 3911 - protein, 18 aa, synthetic construct
KTINGSGSPHSFWSNQQT

SEQ ID NO: 3912 - protein, 18 aa, synthetic construct
KRSYGSGSPHSKAQNQQT

SEQ ID NO: 3913 - protein, 18 aa, synthetic construct
KYVFGSGSPHSKAQNQQT

SEQ ID NO: 3914 - protein, 18 aa, synthetic construct
KTINGSGSPHSKFKNQQT

SEQ ID NO: 3915 - protein, 18 aa, synthetic construct
KTINGSGSPHRIKQNQQT

SEQ ID NO: 3916 - protein, 18 aa, synthetic construct
KTINGSGSPHSKAPRRQT

SEQ ID NO: 3917 - protein, 18 aa, synthetic construct
KTINGSGSPHSFRYNQQT

SEQ ID NO: 3918 - protein, 18 aa, synthetic construct
KTINGSGSPHSKMICQQT

SEQ ID NO: 3919 - protein, 18 aa, synthetic construct
KTINGSGSPHLRWQNQQT

SEQ ID NO: 3920 - protein, 18 aa, synthetic construct
KTINGSGSPHLPTQNQQT

SEQ ID NO: 3921 - protein, 18 aa, synthetic construct
KTINGSGSPHSKWKSQQT

SEQ ID NO: 3922 - protein, 18 aa, synthetic construct
KTINGSGSPHSYMRNQQT

SEQ ID NO: 3923 - protein, 18 aa, synthetic construct
KTINGSGSPHSKAARRQT

SEQ ID NO: 3924 - protein, 18 aa, synthetic construct
KTINGSGSPHLLCQNQQT

SEQ ID NO: 3925 - protein, 18 aa, synthetic construct
KTINGSGSPHRCCQNQQT

SEQ ID NO: 3926 - protein, 18 aa, synthetic construct
KTINGSGSPHLCVQNQQT

SEQ ID NO: 3927 - protein, 18 aa, synthetic construct
KTINGSGSPHSKLTRQQT

SEQ ID NO: 3928 - protein, 18 aa, synthetic construct
KTINGSGSPHSKLCTQQT

SEQ ID NO: 3929 - protein, 18 aa, synthetic construct
KKHLGSGSPHSKAQNQQT

SEQ ID NO: 3930 - protein, 18 aa, synthetic construct
KTINGSGSPHSKIRGQQT

SEQ ID NO: 3931 - protein, 18 aa, synthetic construct
KTINGSGSPHSYLVNQQT

SEQ ID NO: 3932 - protein, 18 aa, synthetic construct
KTINGSGSPHQGCQNQQT

SEQ ID NO: 3933 - protein, 18 aa, synthetic construct
KTINGSGSPHMAFQNQQT

SEQ ID NO: 3934 - protein, 18 aa, synthetic construct
KTINGSGSPHSKACQFQT

SEQ ID NO: 3935 - protein, 18 aa, synthetic construct
KTINGSGSPHSKWGLQQT

SEQ ID NO: 3936 - protein, 18 aa, synthetic construct
KTINGSGSPHSKILRQQT

SEQ ID NO: 3937 - protein, 18 aa, synthetic construct
KTINGSGSPHSFQINQQT

SEQ ID NO: 3938 - protein, 18 aa, synthetic construct
KTINGSGSPHSKACISQT

SEQ ID NO: 3939 - protein, 18 aa, synthetic construct
KTINGSGSPHSKAQTHRT

SEQ ID NO: 3940 - protein, 18 aa, synthetic construct
KTINGSGSPHSKALRCQT

SEQ ID NO: 3941 - protein, 18 aa, synthetic construct
KTINGSGSPHSKAFYIQT

SEQ ID NO: 3942 - protein, 18 aa, synthetic construct
KTINGSGSPHSKAHARQT

SEQ ID NO: 3943 - protein, 18 aa, synthetic construct
KTINGSGSPHSLCLNQQT

SEQ ID NO: 3944 - protein, 18 aa, synthetic construct
KTINGSGSPHSKAFVRQT

SEQ ID NO: 3945 - protein, 18 aa, synthetic construct
KPPLGSGSPHSKAQNQQT

SEQ ID NO: 3946 - protein, 18 aa, synthetic construct
KTINGSGSPHRPWQNQQT

SEQ ID NO: 3947 - protein, 18 aa, synthetic construct
KPARGSGSPHSKAQNQQT

SEQ ID NO: 3948 - protein, 18 aa, synthetic construct
KTINGSGSPHRPRQNQQT

SEQ ID NO: 3949 - protein, 18 aa, synthetic construct
KTINGSGSPHSCPQNQQT

SEQ ID NO: 3950 - protein, 18 aa, synthetic construct
KTINGSGSPHSKAQFILT

SEQ ID NO: 3951 - protein, 18 aa, synthetic construct
KTINGSGSPHSVRYNQQT

SEQ ID NO: 3952 - protein, 18 aa, synthetic construct
KSRRGSGSPHSKAQNQQT

SEQ ID NO: 3953 - protein, 18 aa, synthetic construct
KTINGSGSPHSVRCNQQT

SEQ ID NO: 3954 - protein, 18 aa, synthetic construct
KFFHGSGSPHSKAQNQQT

SEQ ID NO: 3955 - protein, 18 aa, synthetic construct
KTINGSGSPHSKMPCQQT

SEQ ID NO: 3956 - protein, 18 aa, synthetic construct
KTINGSGSPHSKKTSQQT

SEQ ID NO: 3957 - protein, 18 aa, synthetic construct
KRYNGSGSPHSKAQNQQT

SEQ ID NO: 3958 - protein, 18 aa, synthetic construct
KTINGSGSPHSLPYNQQT

SEQ ID NO: 3959 - protein, 18 aa, synthetic construct
KTINGSGSPHVYHQNQQT

SEQ ID NO: 3960 - protein, 18 aa, synthetic construct
KTINGSGSPHSKAQSRKT

SEQ ID NO: 3961 - protein, 18 aa, synthetic construct
KTINGSGSPHSYTRNQQT

SEQ ID NO: 3962 - protein, 18 aa, synthetic construct
KTINGSGSPHLVYQNQQT

SEQ ID NO: 3963 - protein, 18 aa, synthetic construct
KTINGSGSPHSKALRWQT

SEQ ID NO: 3964 - protein, 18 aa, synthetic construct
KTINGSGSPHYRYQNQQT

SEQ ID NO: 3965 - protein, 18 aa, synthetic construct
KTINGSGSPHSWLKNQQT

SEQ ID NO: 3966 - protein, 18 aa, synthetic construct
KTINGSGSPHSKAQMQIT

SEQ ID NO: 3967 - protein, 18 aa, synthetic construct
KTINGSGSPHCPAQNQQT

SEQ ID NO: 3968 - protein, 18 aa, synthetic construct
KTINGSGSPHSMCTNQQT

SEQ ID NO: 3969 - protein, 18 aa, synthetic construct
KTINGSGSPHSPPDNQQT

SEQ ID NO: 3970 - protein, 18 aa, synthetic construct
KTINGSGSPHSKRNYQQT

SEQ ID NO: 3971 - protein, 18 aa, synthetic construct
KTINGSGSPHRWTQNQQT

SEQ ID NO: 3972 - protein, 18 aa, synthetic construct
KTINGSGSPHSKACRLQT

SEQ ID NO: 3973 - protein, 18 aa, synthetic construct
KTINGSGSPHPRKQNQQT

SEQ ID NO: 3974 - protein, 18 aa, synthetic construct
KTINGSGSPHSKCSVQQT

SEQ ID NO: 3975 - protein, 18 aa, synthetic construct
KTINGSGSPHSKAQYVRT

SEQ ID NO: 3976 - protein, 18 aa, synthetic construct
KTINGSGSPHSKARISQT

SEQ ID NO: 3977 - protein, 18 aa, synthetic construct
KTINGSGSPHPFVQNQQT

SEQ ID NO: 3978 - protein, 18 aa, synthetic construct
KTINGSGSPHSKLPKQQT

SEQ ID NO: 3979 - protein, 18 aa, synthetic construct
KTINGSGSPHSKSEQQQT

SEQ ID NO: 3980 - protein, 18 aa, synthetic construct
KTINGSGSPHWVAQNQQT

SEQ ID NO: 3981 - protein, 18 aa, synthetic construct
KTINGSGSPHSLYQNQQT

SEQ ID NO: 3982 - protein, 18 aa, synthetic construct
KTINGSGSPHSKVRMQQT

SEQ ID NO: 3983 - protein, 18 aa, synthetic construct
KTINYTRSPHSKAQNQQT

SEQ ID NO: 3984 - protein, 18 aa, synthetic construct
KTINGSGSPHSSCTNQQT

SEQ ID NO: 3985 - protein, 18 aa, synthetic construct
KTINGSGSPHSKNSRQQT

SEQ ID NO: 3986 - protein, 18 aa, synthetic construct
KTINGSGSPHSKRKRQQT

SEQ ID NO: 3987 - protein, 18 aa, synthetic construct
KTINGSGSPHLCTQNQQT

SEQ ID NO: 3988 - protein, 18 aa, synthetic construct
KTINGSGSPHSKAQSAKT

SEQ ID NO: 3989 - protein, 18 aa, synthetic construct
KTINGSGSPHSTCLNQQT

SEQ ID NO: 3990 - protein, 18 aa, synthetic construct
KTINGSGSPHSYARNQQT

SEQ ID NO: 3991 - protein, 18 aa, synthetic construct
KTINGSGSPHSKQRPQQT

SEQ ID NO: 3992 - protein, 18 aa, synthetic construct
KTINGSGSPHSKRVVQQT

SEQ ID NO: 3993 - protein, 18 aa, synthetic construct
KRFSGSGSPHSKAQNQQT

SEQ ID NO: 3994 - protein, 18 aa, synthetic construct
KTINGSGSPHKSGQNPQT

SEQ ID NO: 3995 - protein, 18 aa, synthetic construct
KTINGSGSPHSKALRHQT

SEQ ID NO: 3996 - protein, 18 aa, synthetic construct
KTINGSGSPHSYYSNQQT

SEQ ID NO: 3997 - protein, 18 aa, synthetic construct
KTINGSGSPHSLTCNQQT

SEQ ID NO: 3998 - protein, 18 aa, synthetic construct
KTINGSGSPHSCQSNQQT

SEQ ID NO: 3999 - protein, 18 aa, synthetic construct
KTINGSGSPHSKAQSIKT

SEQ ID NO: 4000 - protein, 18 aa, synthetic construct
KYSMGSGSPHSKAQNQQT

SEQ ID NO: 4001 - protein, 18 aa, synthetic construct
KTINGSGSPHSKAKGWQT

SEQ ID NO: 4002 - protein, 18 aa, synthetic construct
KTIVGSGSPHSKPQNQQT

SEQ ID NO: 4003 - protein, 18 aa, synthetic construct
KTINGSGSPHFPFQNQQT

SEQ ID NO: 4004 - protein, 18 aa, synthetic construct
KPFLGSGSPHSKAQNQQT

SEQ ID NO: 4005 - protein, 18 aa, synthetic construct
KTINGSGSPHSKCTSQQT

SEQ ID NO: 4006 - protein, 18 aa, synthetic construct
KTINGSGSPHSVFENQQT

SEQ ID NO: 4007 - protein, 18 aa, synthetic construct
KTINGSGSPHSKAKKVQT

SEQ ID NO: 4008 - protein, 18 aa, synthetic construct
KTINGSGSPHSKAQRCST

SEQ ID NO: 4009 - protein, 18 aa, synthetic construct
KTINGSGSPHSKAQFCLT

SEQ ID NO: 4010 - protein, 18 aa, synthetic construct
KTINGSGSPHGRYQNQQT

SEQ ID NO: 4011 - protein, 18 aa, synthetic construct
KTQRKSGSPHSKAQNQQT

SEQ ID NO: 4012 - protein, 18 aa, synthetic construct
KTINGSYSPHCLAQNQQT

SEQ ID NO: 4013 - protein, 18 aa, synthetic construct
KTINGSLSPHFWAQNQQT

SEQ ID NO: 4014 - protein, 18 aa, synthetic construct
KTINHRISPHSKAQNQQT

SEQ ID NO: 4015 - protein, 18 aa, synthetic construct
KTRRPSGSPHSKAQNQQT

SEQ ID NO: 4016 - protein, 18 aa, synthetic construct
KTINGAYSPHRKAQNQQT

SEQ ID NO: 4017 - protein, 18 aa, synthetic construct
KTINGRRSPHGKAQNQQT

SEQ ID NO: 4018 - protein, 18 aa, synthetic construct
KTINGRTSPHRKAQNQQT

SEQ ID NO: 4019 - protein, 18 aa, synthetic construct
KTINGSRSPHAWAQNQQT

SEQ ID NO: 4020 - protein, 18 aa, synthetic construct
KTINKCLSPHSKAQNQQT

SEQ ID NO: 4021 - protein, 18 aa, synthetic construct
KTINGSSSPHRCAQNQQT

SEQ ID NO: 4022 - protein, 18 aa, synthetic construct
KTINCRTSPHSKAQNQQT

SEQ ID NO: 4023 - protein, 18 aa, synthetic construct
KTIFDCGSPHSKAQNQQT

SEQ ID NO: 4024 - protein, 18 aa, synthetic construct
KTINSPRSPHSKAQNQQT

SEQ ID NO: 4025 - protein, 18 aa, synthetic construct
KTINGLDSPHRSRQNQQT

SEQ ID NO: 4026 - protein, 18 aa, synthetic construct
KTRTRSGSPHSKAQNQQT

SEQ ID NO: 4027 - protein, 18 aa, synthetic construct
KTINGSISPHCPAQNQQT

SEQ ID NO: 4028 - protein, 18 aa, synthetic construct
KTINGLVSPHRKAQNQQT

SEQ ID NO: 4029 - protein, 18 aa, synthetic construct
KTINALRSPHSKAQNQQT

SEQ ID NO: 4030 - protein, 18 aa, synthetic construct
KTICGRGSPHSKAQNQQT

SEQ ID NO: 4031 - protein, 18 aa, synthetic construct
KTTRKSGSPHSKAQNQQT

SEQ ID NO: 4032 - protein, 18 aa, synthetic construct
KTMQRSGSPHSKAQNQQT

SEQ ID NO: 4033 - protein, 18 aa, synthetic construct
KTINGSSSPHWMAQNQQT

SEQ ID NO: 4034 - protein, 18 aa, synthetic construct
KTRKRSGSPHSKAQNQQT

SEQ ID NO: 4035 - protein, 18 aa, synthetic construct
KTINFTRSPHSKAQNQQT

SEQ ID NO: 4036 - protein, 18 aa, synthetic construct
KTINNLRSPHSKAQNQQT

SEQ ID NO: 4037 - protein, 18 aa, synthetic construct
KTINGRPSPHGKAQNQQT

SEQ ID NO: 4038 - protein, 18 aa, synthetic construct
KTINWSRSPHSKAQNQQT

SEQ ID NO: 4039 - protein, 18 aa, synthetic construct
KTINGTRSPHKKAQNQQT

SEQ ID NO: 4040 - protein, 18 aa, synthetic construct
KTINGSVSPHCTAQNQQT

SEQ ID NO: 4041 - protein, 18 aa, synthetic construct
KTTRCSGSPHSKAQNQQT

SEQ ID NO: 4042 - protein, 18 aa, synthetic construct
KTKLCSGSPHSKAQNQQT

SEQ ID NO: 4043 - protein, 18 aa, synthetic construct
KTINLGCSPHSKAQNQQT

SEQ ID NO: 4044 - protein, 18 aa, synthetic construct
KTISGHDSPHISGQYQQT

SEQ ID NO: 4045 - protein, 18 aa, synthetic construct
KTINGRRSPHMKAQNQQT

SEQ ID NO: 4046 - protein, 18 aa, synthetic construct
KTINGPWSPHRKAQNQQT

SEQ ID NO: 4047 - protein, 18 aa, synthetic construct
KTINSCFSPHSKAQNQQT

SEQ ID NO: 4048 - protein, 18 aa, synthetic construct
KTIKRYGSPHSKAQNQQT

SEQ ID NO: 4049 - protein, 18 aa, synthetic construct
KTINRYSSPHSKAQNQQT

SEQ ID NO: 4050 - protein, 18 aa, synthetic construct
KTTGRSGSPHSKAQNQQT

SEQ ID NO: 4051 - protein, 18 aa, synthetic construct
KTINRQFSPHSKAQNQQT

SEQ ID NO: 4052 - protein, 18 aa, synthetic construct
KTITGHDSPHSKAQNQQT

SEQ ID NO: 4053 - protein, 18 aa, synthetic construct
KTINGSGSPHKSGQYQQT

SEQ ID NO: 4054 - protein, 18 aa, synthetic construct
KTINGSGSPHKSGQDQQT

SEQ ID NO: 4055 - protein, 18 aa, synthetic construct
KTINGSGSPHKSGQIQQT

SEQ ID NO: 4056 - protein, 18 aa, synthetic construct
KTINGSGSPHKSGRNQQT

SEQ ID NO: 4057 - protein, 18 aa, synthetic construct
KTINGSGSPHKSGKNQQT

SEQ ID NO: 4058 - protein, 18 aa, synthetic construct
KTIYGHDSPHSKAQNQQT

SEQ ID NO: 4059 - protein, 18 aa, synthetic construct
KTINGSGSPHKSGQNQQS

SEQ ID NO: 4060 - protein, 18 aa, synthetic construct
KTINGSGSPHKSGQNLQT

SEQ ID NO: 4061 - protein, 18 aa, synthetic construct
KAINGHDSPHSKAQNQQT

SEQ ID NO: 4062 - protein, 18 aa, synthetic construct
KTVNGHDSPHSKAQNQQT

SEQ ID NO: 4063 - protein, 18 aa, synthetic construct
KTIKGHDSPHSKAQNQQT

SEQ ID NO: 4064 - protein, 18 aa, synthetic construct
KSINGHDSPHSKAQNQQT

SEQ ID NO: 4065 - protein, 18 aa, synthetic construct
KTINGSGSPHKSGQTQQT

SEQ ID NO: 4066 - protein, 18 aa, synthetic construct
KTINGSGSPHKSGHNQQT

SEQ ID NO: 4067 - protein, 18 aa, synthetic construct
KTFNGHDSPHSKAQNQQT

SEQ ID NO: 4068 - protein, 18 aa, synthetic construct
KTINGSGSPHKSGLNQQT

SEQ ID NO: 4069 - protein, 18 aa, synthetic construct
KTINGHDSPHSKALNQQT

SEQ ID NO: 4070 - protein, 18 aa, synthetic construct
KTINGSGSPHKSGQNQLT

SEQ ID NO: 4071 - protein, 18 aa, synthetic construct
KTLNGHDSPHSKAQNQQT

SEQ ID NO: 4072 - protein, 18 aa, synthetic construct
KTINGSGSPHKSGQNQHT

SEQ ID NO: 4073 - protein, 18 aa, synthetic construct
KTIDGHDSPHSKAQNQQT

SEQ ID NO: 4074 - protein, 18 aa, synthetic construct
KTNNGHDSPHSKAQNQQT

SEQ ID NO: 4075 - protein, 18 aa, synthetic construct
KTINGSGSPHKSGQKQQT

SEQ ID NO: 4076 - protein, 18 aa, synthetic construct
KTINGSGSPHKSGQNRQT

SEQ ID NO: 4077 - protein, 18 aa, synthetic construct
KTINGSGSPHKSGQNQQN

SEQ ID NO: 4078 - protein, 18 aa, synthetic construct
KTINGSGSPHKSGQNQQA

SEQ ID NO: 4079 - protein, 18 aa, synthetic construct
KTINGHDSPHSKAHNQQT

SEQ ID NO: 4080 - protein, 18 aa, synthetic construct
KTINGHDSPHSKAQNQQT

SEQ ID NO: 4081 - protein, 18 aa, synthetic construct
KTINGSGSPHKSGQNQQP

SEQ ID NO: 4082 - protein, 18 aa, synthetic construct
KTINGHDSPHCKAQNQQT

SEQ ID NO: 4083 - protein, 18 aa, synthetic construct
KTINGHDSPHSKAQNQQS

SEQ ID NO: 4084 - protein, 18 aa, synthetic construct
KTINGSGSPHKSGQNQQT

SEQ ID NO: 4085 - protein, 18 aa, synthetic construct
KTINGHDSPDKSGQNQQT

SEQ ID NO: 4086 - protein, 18 aa, synthetic construct
KPINGHDSPHKSGQNHQS

SEQ ID NO: 4087 - protein, 18 aa, synthetic construct
KTSNGSGSPHKSGQNQQT

SEQ ID NO: 4088 - protein, 18 aa, synthetic construct
KTVNGSGSPHKSGQNQQT

SEQ ID NO: 4089 - protein, 18 aa, synthetic construct
KTINGHDSTHKSGHNQQT

SEQ ID NO: 4090 - protein, 18 aa, synthetic construct
KTINGHDSPHSKAQNQQN

SEQ ID NO: 4091 - protein, 18 aa, synthetic construct
KTIYGSGSPHKSGQNQQT

SEQ ID NO: 4092 - protein, 18 aa, synthetic construct
KTINGLDSQHKSGQNQQT

SEQ ID NO: 4093-4094 - skipped (2 entries)

SEQ ID NO: 4095 - protein, 18 aa, synthetic construct
KTIIGHDSPHSKAQNQQT

SEQ ID NO: 4096 - protein, 18 aa, synthetic construct
KTSNGHDSPHSKAQNQQT

SEQ ID NO: 4097 - protein, 18 aa, synthetic construct
KTINGSGSPHSKAQNRRR

SEQ ID NO: 4098 - protein, 18 aa, synthetic construct
KTISKRGSPHSKAQNQQT

SEQ ID NO: 4099 - protein, 18 aa, synthetic construct
KGLGGSGSPHSKAQNQQT

SEQ ID NO: 4100 - protein, 18 aa, synthetic construct
KTINGHDSPHSKAQNLQT

SEQ ID NO: 4101 - protein, 18 aa, synthetic construct
KTINGHDSPHSKAQNQQI

SEQ ID NO: 4102 - protein, 18 aa, synthetic construct
KTINGSGSPHFTRQNQQT

SEQ ID NO: 4103 - protein, 18 aa, synthetic construct
KTINGSGSPHSLPWNQQT

SEQ ID NO: 4104 - protein, 18 aa, synthetic construct
KTINGHDSPHSKAQNHQT

SEQ ID NO: 4105 - protein, 18 aa, synthetic construct
KTMNGHDSPHSKAQNQQT

SEQ ID NO: 4106 - protein, 18 aa, synthetic construct
KPYKGSGSPHSKAQNQQT

SEQ ID NO: 4107 - protein, 18 aa, synthetic construct
KRLWGSGSPHSKAQNQQT

SEQ ID NO: 4108 - protein, 18 aa, synthetic construct
KRMRGSGSPHSKAQNQQT

SEQ ID NO: 4109 - protein, 18 aa, synthetic construct
KRTYGSGSPHSKAQNQQT

SEQ ID NO: 4110 - protein, 18 aa, synthetic construct
KTINCLRSPHSKAQNQQT

SEQ ID NO: 4111 - protein, 18 aa, synthetic construct
KTINFSRSPHSKAQNQQT

SEQ ID NO: 4112 - protein, 18 aa, synthetic construct
KTINGLRSPHFKAQNQQT

SEQ ID NO: 4113 - protein, 18 aa, synthetic construct
KTINGNRSPHNKAQNQQT

SEQ ID NO: 4114 - protein, 18 aa, synthetic construct
KTINGPRSPHYKAQNQQT

SEQ ID NO: 4115 - protein, 18 aa, synthetic construct
KTINGQASPHWKAQNQQT

SEQ ID NO: 4116 - protein, 18 aa, synthetic construct
KTINGRCSPHSKAQNQQT

SEQ ID NO: 4117 - protein, 18 aa, synthetic construct
KTINGRHSPHSKAQNQQT

SEQ ID NO: 4118 - protein, 18 aa, synthetic construct
KTINGRKSPHRKAQNQQT

SEQ ID NO: 4119 - protein, 18 aa, synthetic construct
KTINGRLSPHWKAQNQQT

SEQ ID NO: 4120 - protein, 18 aa, synthetic construct
KTINGRLSPHYKAQNQQT

SEQ ID NO: 4121 - protein, 18 aa, synthetic construct
KTINGRPSPHMKAQNQQT

SEQ ID NO: 4122 - protein, 18 aa, synthetic construct
KTINGRSSPHWKAQNQQT

SEQ ID NO: 4123 - protein, 18 aa, synthetic construct
KTINGRWSPHSKAQNQQT

SEQ ID NO: 4124 - protein, 18 aa, synthetic construct
KTINGSGSPHAPCQNQQT

SEQ ID NO: 4125 - protein, 18 aa, synthetic construct
KTINGSGSPHAWAQNQQT

SEQ ID NO: 4126 - protein, 18 aa, synthetic construct
KTINGSGSPHCMRQNQQT

SEQ ID NO: 4127 - protein, 18 aa, synthetic construct
KTINGSGSPHFCSQNQQT

SEQ ID NO: 4128 - protein, 18 aa, synthetic construct
KTINGSGSPHFLFQNQQT

SEQ ID NO: 4129 - protein, 18 aa, synthetic construct
KTINGSGSPHFWAQNQQT

SEQ ID NO: 4130 - protein, 18 aa, synthetic construct
KTINGSGSPHLCAQNQQT

SEQ ID NO: 4131 - protein, 18 aa, synthetic construct
KTINGSGSPHLRYQNQQT

SEQ ID NO: 4132 - protein, 18 aa, synthetic construct
KTINGSGSPHLYYQNQQT

SEQ ID NO: 4133 - protein, 18 aa, synthetic construct
KTINGSGSPHPLCQNQQT

SEQ ID NO: 4134 - protein, 18 aa, synthetic construct
KTINGSGSPHRIRQNQQT

SEQ ID NO: 4135 - protein, 18 aa, synthetic construct
KTINGSGSPHRLFQNQQT

SEQ ID NO: 4136 - protein, 18 aa, synthetic construct
KTINGSGSPHSCGQNQQT

SEQ ID NO: 4137 - protein, 18 aa, synthetic construct
KTINGSGSPHSCLRNQQT

SEQ ID NO: 4138 - protein, 18 aa, synthetic construct
KTINGSGSPHSCLSNQQT

SEQ ID NO: 4139 - protein, 18 aa, synthetic construct
KTINGSGSPHSCRLNQQT

SEQ ID NO: 4140 - protein, 18 aa, synthetic construct
KTINGSGSPHSCSLNQQT

SEQ ID NO: 4141 - protein, 18 aa, synthetic construct
KTINGSGSPHSKACTLQT

SEQ ID NO: 4142 - protein, 18 aa, synthetic construct
KTINGSGSPHSKAFRAQT

SEQ ID NO: 4143 - protein, 18 aa, synthetic construct
KTINGSGSPHSKAIRKQT

SEQ ID NO: 4144 - protein, 18 aa, synthetic construct
KTINGSGSPHSKAQASRT

SEQ ID NO: 4145 - protein, 18 aa, synthetic construct
KTINGSGSPHSKAQFELT

SEQ ID NO: 4146 - protein, 18 aa, synthetic construct
KTINGSGSPHSKAQIVIT

SEQ ID NO: 4147 - protein, 18 aa, synthetic construct
KTINGSGSPHSKAQLART

SEQ ID NO: 4148 - protein, 18 aa, synthetic construct
KTINGSGSPHSKAQLQRT

SEQ ID NO: 4149 - protein, 18 aa, synthetic construct
KTINGSGSPHSKAQNARR

SEQ ID NO: 4150 - protein, 18 aa, synthetic construct
KTINGSGSPHSKAQNCPR

SEQ ID NO: 4151 - protein, 18 aa, synthetic construct
KTINGSGSPHSKAQNMRR

SEQ ID NO: 4152 - protein, 18 aa, synthetic construct
KTINGSGSPHSKAQNRRV

SEQ ID NO: 4153 - protein, 18 aa, synthetic construct
KTINGSGSPHSKAQPSRT

SEQ ID NO: 4154 - protein, 18 aa, synthetic construct
KTINGSGSPHSKAQQVKT

SEQ ID NO: 4155 - protein, 18 aa, synthetic construct
KTINGSGSPHSKAQQVRT

SEQ ID NO: 4156 - protein, 18 aa, synthetic construct
KTINGSGSPHSKAQRLKT

SEQ ID NO: 4157 - protein, 18 aa, synthetic construct
KTINGSGSPHSKAQRRAT

SEQ ID NO: 4158 - protein, 18 aa, synthetic construct
KTINGSGSPHSKAQRRGT

SEQ ID NO: 4159 - protein, 18 aa, synthetic construct
KTINGSGSPHSKAQRRRT

SEQ ID NO: 4160 - protein, 18 aa, synthetic construct
KTINGSGSPHSKAQRTRT

SEQ ID NO: 4161 - protein, 18 aa, synthetic construct
KTINGSGSPHSKAQRVHT

SEQ ID NO: 4162 - protein, 18 aa, synthetic construct
KTINGSGSPHSKAQTYRT

SEQ ID NO: 4163 - protein, 18 aa, synthetic construct
KTINGSGSPHSKAQVRKT

SEQ ID NO: 4164 - protein, 18 aa, synthetic construct
KTINGSGSPHSKARGRQT

SEQ ID NO: 4165 - protein, 18 aa, synthetic construct
KTINGSGSPHSKARLCQT

SEQ ID NO: 4166 - protein, 18 aa, synthetic construct
KTINGSGSPHSKARLKQT

SEQ ID NO: 4167 - protein, 18 aa, synthetic construct
KTINGSGSPHSKARNSQT

SEQ ID NO: 4168 - protein, 18 aa, synthetic construct
KTINGSGSPHSKARWVQT

SEQ ID NO: 4169 - protein, 18 aa, synthetic construct
KTINGSGSPHSKAVRWQT

SEQ ID NO: 4170 - protein, 18 aa, synthetic construct
KTINGSGSPHSKAYTRQT

SEQ ID NO: 4171 - protein, 18 aa, synthetic construct
KTINGSGSPHSKCQSQQT

SEQ ID NO: 4172 - protein, 18 aa, synthetic construct
KTINGSGSPHSKFLRQQT

SEQ ID NO: 4173 - protein, 18 aa, synthetic construct
KTINGSGSPHSKFRFQQT

SEQ ID NO: 4174 - protein, 18 aa, synthetic construct
KTINGSGSPHSKFRLQQT

SEQ ID NO: 4175 - protein, 18 aa, synthetic construct
KTINGSGSPHSKFRRQQT

SEQ ID NO: 4176 - protein, 18 aa, synthetic construct
KTINGSGSPHSKGMKQQT

SEQ ID NO: 4177 - protein, 18 aa, synthetic construct
KTINGSGSPHSKKLRQQT

SEQ ID NO: 4178 - protein, 18 aa, synthetic construct
KTINGSGSPHSKKRPQQT

SEQ ID NO: 4179 - protein, 18 aa, synthetic construct
KTINGSGSPHSKKSRQQT

SEQ ID NO: 4180 - protein, 18 aa, synthetic construct
KTINGSGSPHSKLYRQQT

SEQ ID NO: 4181 - protein, 18 aa, synthetic construct
KTINGSGSPHSKLYWQQT

SEQ ID NO: 4182 - protein, 18 aa, synthetic construct
KTINGSGSPHSKPRMQQT

SEQ ID NO: 4183 - protein, 18 aa, synthetic construct
KTINGSGSPHSKRFPQQT

SEQ ID NO: 4184 - protein, 18 aa, synthetic construct
KTINGSGSPHSKRFRQQT

SEQ ID NO: 4185 - protein, 18 aa, synthetic construct
KTINGSGSPHSKRPYQQT

SEQ ID NO: 4186 - protein, 18 aa, synthetic construct
KTINGSGSPHSKRRMQQT

SEQ ID NO: 4187 - protein, 18 aa, synthetic construct
KTINGSGSPHSKRSKQQT

SEQ ID NO: 4188 - protein, 18 aa, synthetic construct
KTINGSGSPHSKRSRQQT

SEQ ID NO: 4189 - protein, 18 aa, synthetic construct
KTINGSGSPHSKRTMQQT

SEQ ID NO: 4190 - protein, 18 aa, synthetic construct
KTINGSGSPHSKRTRQQT

SEQ ID NO: 4191 - protein, 18 aa, synthetic construct
KTINGSGSPHSKRVRQQT

SEQ ID NO: 4192 - protein, 18 aa, synthetic construct
KTINGSGSPHSKRYIQQT

SEQ ID NO: 4193 - protein, 18 aa, synthetic construct
KTINGSGSPHSKRYNQQT

SEQ ID NO: 4194 - protein, 18 aa, synthetic construct
KTINGSGSPHSKRYPQQT

SEQ ID NO: 4195 - protein, 18 aa, synthetic construct
KTINGSGSPHSKRYSQQT

SEQ ID NO: 4196 - protein, 18 aa, synthetic construct
KTINGSGSPHSKTCIQQT

SEQ ID NO: 4197 - protein, 18 aa, synthetic construct
KTINGSGSPHSKWLTQQT

SEQ ID NO: 4198 - protein, 18 aa, synthetic construct
KTINGSGSPHSKWVVQQT

SEQ ID NO: 4199 - protein, 18 aa, synthetic construct
KTINGSGSPHSKYRLQQT

SEQ ID NO: 4200 - protein, 18 aa, synthetic construct
KTINGSGSPHSKYSKQQT

SEQ ID NO: 4201 - protein, 18 aa, synthetic construct
KTINGSGSPHSKYSRQQT

SEQ ID NO: 4202 - protein, 18 aa, synthetic construct
KTINGSGSPHSLKRNQQT

SEQ ID NO: 4203 - protein, 18 aa, synthetic construct
KTINGSGSPHSLWFNQQT

SEQ ID NO: 4204 - protein, 18 aa, synthetic construct
KTINGSGSPHSLWPNQQT

SEQ ID NO: 4205 - protein, 18 aa, synthetic construct
KTINGSGSPHSLWTNQQT

SEQ ID NO: 4206 - protein, 18 aa, synthetic construct
KTINGSGSPHSMRRNQQT

SEQ ID NO: 4207 - protein, 18 aa, synthetic construct
KTINGSGSPHSPCLNQQT

SEQ ID NO: 4208 - protein, 18 aa, synthetic construct
KTINGSGSPHSQWQNQQT

SEQ ID NO: 4209 - protein, 18 aa, synthetic construct
KTINGSGSPHSRCANQQT

SEQ ID NO: 4210 - protein, 18 aa, synthetic construct
KTINGSGSPHSRIRNQQT

SEQ ID NO: 4211 - protein, 18 aa, synthetic construct
KTINGSGSPHSRKSNQQT

SEQ ID NO: 4212 - protein, 18 aa, synthetic construct
KTINGSGSPHSRLWNQQT

SEQ ID NO: 4213 - protein, 18 aa, synthetic construct
KTINGSGSPHSRRFNQQT

SEQ ID NO: 4214 - protein, 18 aa, synthetic construct
KTINGSGSPHSRRPNQQT

SEQ ID NO: 4215 - protein, 18 aa, synthetic construct
KTINGSGSPHSRSCNQQT

SEQ ID NO: 4216 - protein, 18 aa, synthetic construct
KTINGSGSPHSRSKNQQT

SEQ ID NO: 4217 - protein, 18 aa, synthetic construct
KTINGSGSPHSRTKNQQT

SEQ ID NO: 4218 - protein, 18 aa, synthetic construct
KTINGSGSPHSRWLNQQT

SEQ ID NO: 4219 - protein, 18 aa, synthetic construct
KTINGSGSPHSSVCNQQT

SEQ ID NO: 4220 - protein, 18 aa, synthetic construct
KTINGSGSPHSSWRNQQT

SEQ ID NO: 4221 - protein, 18 aa, synthetic construct
KTINGSGSPHSVCQNQQT

SEQ ID NO: 4222 - protein, 18 aa, synthetic construct
KTINGSGSPHSVLCNQQT

SEQ ID NO: 4223 - protein, 18 aa, synthetic construct
KTINGSGSPHSVRRNQQT

SEQ ID NO: 4224 - protein, 18 aa, synthetic construct
KTINGSGSPHSVSCNQQT

SEQ ID NO: 4225 - protein, 18 aa, synthetic construct
KTINGSGSPHSWALNQQT

SEQ ID NO: 4226 - protein, 18 aa, synthetic construct
KTINGSGSPHSWITNQQT

SEQ ID NO: 4227 - protein, 18 aa, synthetic construct
KTINGSGSPHSWPMNQQT

SEQ ID NO: 4228 - protein, 18 aa, synthetic construct
KTINGSGSPHSWRSNQQT

SEQ ID NO: 4229 - protein, 18 aa, synthetic construct
KTINGSGSPHSYFLNQQT

SEQ ID NO: 4230 - protein, 18 aa, synthetic construct
KTINGSGSPHSYTYNQQT

SEQ ID NO: 4231 - protein, 18 aa, synthetic construct
KTINGSGSPHSYWQNQQT

SEQ ID NO: 4232 - protein, 18 aa, synthetic construct
KTINGSGSPHTLCQNQQT

SEQ ID NO: 4233 - protein, 18 aa, synthetic construct
KTINGSGSPHWLRQNQQT

SEQ ID NO: 4234 - protein, 18 aa, synthetic construct
KTINGSGSPHWPSQNQQT

SEQ ID NO: 4235 - protein, 18 aa, synthetic construct
KTINGSGSPHYLRQNQQT

SEQ ID NO: 4236 - protein, 18 aa, synthetic construct
KTINGSGSPHYTRQNQQT

SEQ ID NO: 4237 - protein, 18 aa, synthetic construct
KTINGSLSPHLWAQNQQT

SEQ ID NO: 4238 - protein, 18 aa, synthetic construct
KTINGSPSPHCQAQNQQT

SEQ ID NO: 4239 - protein, 18 aa, synthetic construct
KTINGSRSPHLCAQNQQT

SEQ ID NO: 4240 - protein, 18 aa, synthetic construct
KTINGSRSPHWRAQNQQT

SEQ ID NO: 4241 - protein, 18 aa, synthetic construct
KTINGSVSPHWLAQNQQT

SEQ ID NO: 4242 - protein, 18 aa, synthetic construct
KTINGTFSPHRKAQNQQT

SEQ ID NO: 4243 - protein, 18 aa, synthetic construct
KTINGWTSPHRKAQNQQT

SEQ ID NO: 4244 - protein, 18 aa, synthetic construct
KTINRGISPHSKAQNQQT

SEQ ID NO: 4245 - protein, 18 aa, synthetic construct
KTINTVRSPHSKAQNQQT

SEQ ID NO: 4246 - protein, 18 aa, synthetic construct
KTKLRSGSPHSKAQNQQT

SEQ ID NO: 4247 - protein, 18 aa, synthetic construct
KTRLRSGSPHSKAQNQQT

SEQ ID NO: 4248 - protein, 18 aa, synthetic construct
KWLLGSGSPHSKAQNQQT

SEQ ID NO: 4249 - protein, 18 aa, synthetic construct
KWSQGSGSPHSKAQNQQT

SEQ ID NO: 4250 - protein, 18 aa, synthetic construct
KWYLGSGSPHSKAQNQQT

SEQ ID NO: 4251 - protein, 18 aa, synthetic construct
KYHSGSGSPHSKAQNQQT

SEQ ID NO: 4252 - protein, 18 aa, synthetic construct
KYLPGSGSPHSKAQNQQT

SEQ ID NO: 4253 - protein, 18 aa, synthetic construct
KAINGGGSPHSKTQNQQT

SEQ ID NO: 4254 - protein, 18 aa, synthetic construct
KAINGHDSPHKRSPNQQT

SEQ ID NO: 4255 - protein, 18 aa, synthetic construct
KAINGHDSPHKSFSPQQT

SEQ ID NO: 4256 - protein, 18 aa, synthetic construct
KAINGHDSPHKSGENQQP

SEQ ID NO: 4257 - protein, 18 aa, synthetic construct
KAINGHDSPHKSGQLART

SEQ ID NO: 4258 - protein, 18 aa, synthetic construct
KAINGHDSPHKSGQNAFL

SEQ ID NO: 4259 - protein, 18 aa, synthetic construct
KAINGHDSPHKSGQNAYT

SEQ ID NO: 4260 - protein, 18 aa, synthetic construct
KAINGHDSPHKSGQNFAS

SEQ ID NO: 4261 - protein, 18 aa, synthetic construct
KAINGHDSPHKSGQNLAS

SEQ ID NO: 4262 - protein, 18 aa, synthetic construct
KAINGHDSPHKSGQNLGS

SEQ ID NO: 4263 - protein, 18 aa, synthetic construct
KAINGHDSPHKSGQNLKF

SEQ ID NO: 4264 - protein, 18 aa, synthetic construct
KAINGHDSPHKSGQNLLK

SEQ ID NO: 4265 - protein, 18 aa, synthetic construct
KAINGHDSPHKSGQNLSR

SEQ ID NO: 4266 - protein, 18 aa, synthetic construct
KAINGHDSPHKSGQNLSS

SEQ ID NO: 4267 - protein, 18 aa, synthetic construct
KAINGHDSPHKSGQNSLG

SEQ ID NO: 4268 - protein, 18 aa, synthetic construct
KAINGHDSPHKSGQNTLQ

SEQ ID NO: 4269 - protein, 18 aa, synthetic construct
KAINGHDSPHKSGQNTSL

SEQ ID NO: 4270 - protein, 18 aa, synthetic construct
KAINGHDSPHKSGQRLGT

SEQ ID NO: 4271 - protein, 18 aa, synthetic construct
KAINGHDSPHKSGQRNYT

SEQ ID NO: 4272 - protein, 18 aa, synthetic construct
KAINGHDSPHKSGQRPST

SEQ ID NO: 4273 - protein, 18 aa, synthetic construct
KAINGHDSPHKSGQRPVT

SEQ ID NO: 4274 - protein, 18 aa, synthetic construct
KAINGHDSPHKSGQVPST

SEQ ID NO: 4275 - protein, 18 aa, synthetic construct
KAINGHDSPHKSLSNQQT

SEQ ID NO: 4276 - protein, 18 aa, synthetic construct
KAINGHDSPHKSVLSQQT

SEQ ID NO: 4277 - protein, 18 aa, synthetic construct
KAINGHDSPHKTLQNQQT

SEQ ID NO: 4278 - protein, 18 aa, synthetic construct
KAINGHNSPHSKAQNQQT

SEQ ID NO: 4279 - protein, 18 aa, synthetic construct
KAINGLDSPHSKAQNQQT

SEQ ID NO: 4280 - protein, 18 aa, synthetic construct
KAINGSGSPHKSGQNQQT

SEQ ID NO: 4281 - protein, 18 aa, synthetic construct
KAINGSGSPHSKAQGQQT

SEQ ID NO: 4282 - protein, 18 aa, synthetic construct
KAINGSGSPHSKAQLSGT

SEQ ID NO: 4283 - protein, 18 aa, synthetic construct
KAINGSGSPHSKAQNGSL

SEQ ID NO: 4284 - protein, 18 aa, synthetic construct
KAINGSGSPHSKAQNSLL

SEQ ID NO: 4285 - protein, 18 aa, synthetic construct
KAINGSGSPHSKAVGLQT

SEQ ID NO: 4286 - protein, 18 aa, synthetic construct
KAINGSGSPHSKSLLQQT

SEQ ID NO: 4287 - protein, 18 aa, synthetic construct
KAINGSGSPHSKSLPQQT

SEQ ID NO: 4288 - protein, 18 aa, synthetic construct
KAINGSGSPHSKSTFQQT

SEQ ID NO: 4289 - protein, 18 aa, synthetic construct
KAITGHDSPHSKAQNQQT

SEQ ID NO: 4290 - protein, 18 aa, synthetic construct
KDVMGSGSPHSKAQNQQT

SEQ ID NO: 4291 - protein, 18 aa, synthetic construct
KEIVGSGSPHSKAQNQQT

SEQ ID NO: 4292 - protein, 18 aa, synthetic construct
KEIYGSGSPHSKAQNQQT

SEQ ID NO: 4293 - protein, 18 aa, synthetic construct
KELSGSGSPHSKAQNQQT

SEQ ID NO: 4294 - protein, 18 aa, synthetic construct
KETIGSGSPHSKAQNQQT

SEQ ID NO: 4295 - protein, 18 aa, synthetic construct
KEVLGSGSPHSKAQNQQT

SEQ ID NO: 4296 - protein, 18 aa, synthetic construct
KFALGHDSPHKSGQKQQT

SEQ ID NO: 4297 - protein, 18 aa, synthetic construct
KIINGHDSPHKSGQNLVL

SEQ ID NO: 4298 - protein, 18 aa, synthetic construct
KIINGHDSPHKSGQRNYT

SEQ ID NO: 4299 - protein, 18 aa, synthetic construct
KIINGHDSPHSKAQNQQT

SEQ ID NO: 4300 - protein, 18 aa, synthetic construct
KLNPGHDSPHKSGQTQQT

SEQ ID NO: 4301 - protein, 18 aa, synthetic construct
KLNRGHDSPHKSGQNQQS

SEQ ID NO: 4302 - protein, 18 aa, synthetic construct
KLSSGHDSPHKSGQNQQN

SEQ ID NO: 4303 - protein, 18 aa, synthetic construct
KNINGHDSPHSKAQNQQT

SEQ ID NO: 4304 - protein, 18 aa, synthetic construct
KNNDGSGSPHSKAQNQQT

SEQ ID NO: 4305 - protein, 18 aa, synthetic construct
KNVMGSGSPHSKAQNQQT

SEQ ID NO: 4306 - protein, 18 aa, synthetic construct
KPINGHDSPHKSGQNKLS

SEQ ID NO: 4307 - protein, 18 aa, synthetic construct
KPINGHDSPHKSGQNLSS

SEQ ID NO: 4308 - protein, 18 aa, synthetic construct
KPINGHDSPHSKAQNQQT

SEQ ID NO: 4309 - protein, 18 aa, synthetic construct
KRINGHDSPHSKAQNQQT

SEQ ID NO: 4310 - protein, 18 aa, synthetic construct
KSCSGHDSPHKSGQNQQS

SEQ ID NO: 4311 - protein, 18 aa, synthetic construct
KSINGHDSPHKSGQNLAS

SEQ ID NO: 4312 - protein, 18 aa, synthetic construct
KSINGHDSPHKSGQNLFL

SEQ ID NO: 4313 - protein, 18 aa, synthetic construct
KSINGHDSPHKSGQNLLM

SEQ ID NO: 4314 - protein, 18 aa, synthetic construct
KSINGHDSPHKSGQNLLQ

SEQ ID NO: 4315 - protein, 18 aa, synthetic construct
KSINGHDSPHKSGQNSLG

SEQ ID NO: 4316 - protein, 18 aa, synthetic construct
KSINGHDSPHKSGQNTLQ

SEQ ID NO: 4317 - protein, 18 aa, synthetic construct
KSINGHDSPHKSSSNQQT

SEQ ID NO: 4318 - protein, 18 aa, synthetic construct
KSINGHDSPHKYKLNQQT

SEQ ID NO: 4319 - protein, 18 aa, synthetic construct
KSINGSGSPHKSGQKQQT

SEQ ID NO: 4320 - protein, 18 aa, synthetic construct
KSINGSGSPHKSGQNQQT

SEQ ID NO: 4321 - protein, 18 aa, synthetic construct
KSINGSGSPHSKAQGLST

SEQ ID NO: 4322 - protein, 18 aa, synthetic construct
KSINGSGSPHSKAQLLGT

SEQ ID NO: 4323 - protein, 18 aa, synthetic construct
KSINGSGSPHSKTSWQQT

SEQ ID NO: 4324 - protein, 18 aa, synthetic construct
KSMNGHDSPHSKAQNQQT

SEQ ID NO: 4325 - protein, 18 aa, synthetic construct
KSTLGSGSPHSKAQNQHT

SEQ ID NO: 4326 - protein, 18 aa, synthetic construct
KSTLGSGSPHSKAQNQQN

SEQ ID NO: 4327 - protein, 18 aa, synthetic construct
KSTVGSGSPHSKAQTQQT

SEQ ID NO: 4328 - protein, 18 aa, synthetic construct
KTCKESGSPHSKAQNQQT

SEQ ID NO: 4329 - protein, 18 aa, synthetic construct
KTCKGSGSPHSKAQNQQT

SEQ ID NO: 4330 - protein, 18 aa, synthetic construct
KTCKSSGSPHSKAQNQQT

SEQ ID NO: 4331 - protein, 18 aa, synthetic construct
KTDMGSGSPHSKAQNQQT

SEQ ID NO: 4332 - protein, 18 aa, synthetic construct
KTDNGIGSPHSKAQNQQT

SEQ ID NO: 4333 - protein, 18 aa, synthetic construct
KTEGGSGSPHSKAQNQQT

SEQ ID NO: 4334 - protein, 18 aa, synthetic construct
KTEHHSGSPHSKAQNQQT

SEQ ID NO: 4335 - protein, 18 aa, synthetic construct
KTEKDSGSPHSKAQNQQT

SEQ ID NO: 4336 - protein, 18 aa, synthetic construct
KTELGHDSPHKRGQNQQT

SEQ ID NO: 4337 - protein, 18 aa, synthetic construct
KTESVSGSPHSKAQNQQT

SEQ ID NO: 4338 - protein, 18 aa, synthetic construct
KTETNSGSPHSKAQNQQT

SEQ ID NO: 4339 - protein, 18 aa, synthetic construct
KTETYSGSPHSKAQNQQT

SEQ ID NO: 4340 - protein, 18 aa, synthetic construct
KTEWLSGSPHSKAQNQQT

SEQ ID NO: 4341 - protein, 18 aa, synthetic construct
KTFNGSGSPHKSGQNQQT

SEQ ID NO: 4342 - protein, 18 aa, synthetic construct
KTGLRHDSPHKSGQKQQT

SEQ ID NO: 4343 - protein, 18 aa, synthetic construct
KTGLRHDSPHKSGQNQQS

SEQ ID NO: 4344 - protein, 18 aa, synthetic construct
KTGVTHDSPHKSGQKQQT

SEQ ID NO: 4345 - protein, 18 aa, synthetic construct
KTIDGHESPHSKAQNQQT

SEQ ID NO: 4346 - protein, 18 aa, synthetic construct
KTIEGHDSPHKSGQTQQT

SEQ ID NO: 4347 - protein, 18 aa, synthetic construct
KTIHGHDSPHSKAQNQQT

SEQ ID NO: 4348 - protein, 18 aa, synthetic construct
KTIHGHESPHSKAQNQQT

SEQ ID NO: 4349 - protein, 18 aa, synthetic construct
KTIIGHDSPHKSGQNRSS

SEQ ID NO: 4350 - protein, 18 aa, synthetic construct
KTIIGHDSPHKSGQRLGT

SEQ ID NO: 4351 - protein, 18 aa, synthetic construct
KTIIGSGSPHKSGQNQQT

SEQ ID NO: 4352 - protein, 18 aa, synthetic construct
KTIKGHDSPHKSGQNMLF

SEQ ID NO: 4353 - protein, 18 aa, synthetic construct
KTILGSGSPHSKAQNLQT

SEQ ID NO: 4354 - protein, 18 aa, synthetic construct
KTINGCSSPHWKAQNQQT

SEQ ID NO: 4355 - protein, 18 aa, synthetic construct
KTINGGGSTHSKAQNQQT

SEQ ID NO: 4356 - protein, 18 aa, synthetic construct
KTINGHDSPHKAGQSQQT

SEQ ID NO: 4357 - protein, 18 aa, synthetic construct
KTINGHDSPHKRGQNVPS

SEQ ID NO: 4358 - protein, 18 aa, synthetic construct
KTINGHDSPHKRGRSYQT

SEQ ID NO: 4359 - protein, 18 aa, synthetic construct
KTINGHDSPHKTGQNPPT

SEQ ID NO: 4360 - protein, 18 aa, synthetic construct
KTINGHDSPHSKAENQQT

SEQ ID NO: 4361 - protein, 18 aa, synthetic construct
KTINGHDSPHSKALSLQT

SEQ ID NO: 4362 - protein, 18 aa, synthetic construct
KTINGHDSPHSKAQGQQT

SEQ ID NO: 4363 - protein, 18 aa, synthetic construct
KTINGHDSPHSKAQHQQT

SEQ ID NO: 4364 - protein, 18 aa, synthetic construct
KTINGHDSPHSKAQIQQT

SEQ ID NO: 4365 - protein, 18 aa, synthetic construct
KTINGHDSPHSKAQKQQT

SEQ ID NO: 4366 - protein, 18 aa, synthetic construct
KTINGHDSPHSKAQNLSS

SEQ ID NO: 4367 - protein, 18 aa, synthetic construct
KTINGHDSPHSKAQNPQT

SEQ ID NO: 4368 - protein, 18 aa, synthetic construct
KTINGHDSPHSKAQNQET

SEQ ID NO: 4369 - protein, 18 aa, synthetic construct
KTINGHDSPHSKAQNQHT

SEQ ID NO: 4370 - protein, 18 aa, synthetic construct
KTINGHDSPHSKAQNQLT

SEQ ID NO: 4371 - protein, 18 aa, synthetic construct
KTINGHDSPHSKAQNQPT

SEQ ID NO: 4372 - protein, 18 aa, synthetic construct
KTINGHDSPHSKAQNQQA

SEQ ID NO: 4373 - protein, 18 aa, synthetic construct
KTINGHDSPHSKAQNTGS

SEQ ID NO: 4374 - protein, 18 aa, synthetic construct
KTINGHDSPHSKAQSQQT

SEQ ID NO: 4375 - protein, 18 aa, synthetic construct
KTINGHDSPHSKAQTQQT

SEQ ID NO: 4376 - protein, 18 aa, synthetic construct
KTINGHDSPHSKAQYQQT

SEQ ID NO: 4377 - protein, 18 aa, synthetic construct
KTINGHDSPHSKARNQQT

SEQ ID NO: 4378 - protein, 18 aa, synthetic construct
KTINGHDSPHSKLPGQQT

SEQ ID NO: 4379 - protein, 18 aa, synthetic construct
KTINGHDSPHSKSPNQQT

SEQ ID NO: 4380 - protein, 18 aa, synthetic construct
KTINGHESPHKSGQNAFL

SEQ ID NO: 4381 - protein, 18 aa, synthetic construct
KTINGIGSPHSKAPNEQT

SEQ ID NO: 4382 - protein, 18 aa, synthetic construct
KTINGQDSPHKSGQNLHM

SEQ ID NO: 4383 - protein, 18 aa, synthetic construct
KTINGRGSPHSKAQIGMT

SEQ ID NO: 4384 - protein, 18 aa, synthetic construct
KTINGRGSPHSKAQNQVL

SEQ ID NO: 4385 - protein, 18 aa, synthetic construct
KTINGRGSPHSKAQSPTT

SEQ ID NO: 4386 - protein, 18 aa, synthetic construct
KTINGRGSPHSKATSFQT

SEQ ID NO: 4387 - protein, 18 aa, synthetic construct
KTINGSGSPHFVVQNQQT

SEQ ID NO: 4388 - protein, 18 aa, synthetic construct
KTINGSGSPHKRGQKQQT

SEQ ID NO: 4389 - protein, 18 aa, synthetic construct
KTINGSGSPHKRGQNQET

SEQ ID NO: 4390 - protein, 18 aa, synthetic construct
KTINGSGSPHKRGQNQLT

SEQ ID NO: 4391 - protein, 18 aa, synthetic construct
KTINGSGSPHKRGRNQQT

SEQ ID NO: 4392 - protein, 18 aa, synthetic construct
KTINGSGSPHKSGGNQQT

SEQ ID NO: 4393 - protein, 18 aa, synthetic construct
KTINGSGSPHKSGHNQET

SEQ ID NO: 4394 - protein, 18 aa, synthetic construct
KTINGSGSPHKSGHNQLT

SEQ ID NO: 4395 - protein, 18 aa, synthetic construct
KTINGSGSPHKSGHNQQN

SEQ ID NO: 4396 - protein, 18 aa, synthetic construct
KTINGSGSPHKSGLNQLT

SEQ ID NO: 4397 - protein, 18 aa, synthetic construct
KTINGSGSPHKSGPNQQT

SEQ ID NO: 4398 - protein, 18 aa, synthetic construct
KTINGSGSPHKSGQGQQT

SEQ ID NO: 4399 - protein, 18 aa, synthetic construct
KTINGSGSPHKSGQHLQT

SEQ ID NO: 4400 - protein, 18 aa, synthetic construct
KTINGSGSPHKSGQHQQT

SEQ ID NO: 4401 - protein, 18 aa, synthetic construct
KTINGSGSPHKSGQKHQT

SEQ ID NO: 4402 - protein, 18 aa, synthetic construct
KTINGSGSPHKSGQKQQS

SEQ ID NO: 4403 - protein, 18 aa, synthetic construct
KTINGSGSPHKSGQNEQT

SEQ ID NO: 4404 - protein, 18 aa, synthetic construct
KTINGSGSPHKSGQNHQT

SEQ ID NO: 4405 - protein, 18 aa, synthetic construct
KTINGSGSPHKSGQNKQT

SEQ ID NO: 4406 - protein, 18 aa, synthetic construct
KTINGSGSPHKSGQNKTS

SEQ ID NO: 4407 - protein, 18 aa, synthetic construct
KTINGSGSPHKSGQNQEA

SEQ ID NO: 4408 - protein, 18 aa, synthetic construct
KTINGSGSPHKSGQNQET

SEQ ID NO: 4409 - protein, 18 aa, synthetic construct
KTINGSGSPHKSGQNQKT

SEQ ID NO: 4410 - protein, 18 aa, synthetic construct
KTINGSGSPHKSGQNQQI

SEQ ID NO: 4411 - protein, 18 aa, synthetic construct
KTINGSGSPHKSGQNQQR

SEQ ID NO: 4412 - protein, 18 aa, synthetic construct
KTINGSGSPHKSGQNQRT

SEQ ID NO: 4413 - protein, 18 aa, synthetic construct
KTINGSGSPHKSGQNQYT

SEQ ID NO: 4414 - protein, 18 aa, synthetic construct
KTINGSGSPHKSGQRQQT

SEQ ID NO: 4415 - protein, 18 aa, synthetic construct
KTINGSGSPHKSGQSQQT

SEQ ID NO: 4416 - protein, 18 aa, synthetic construct
KTINGSGSPHKSGQYQRT

SEQ ID NO: 4417 - protein, 18 aa, synthetic construct
KTINGSGSPHKSGRNQQA

SEQ ID NO: 4418 - protein, 18 aa, synthetic construct
KTINGSGSPHKSRHNQQT

SEQ ID NO: 4419 - protein, 18 aa, synthetic construct
KTINGSGSPHKSRQYQQT

SEQ ID NO: 4420 - protein, 18 aa, synthetic construct
KTINGSGSPHRKAQAPGT

SEQ ID NO: 4421 - protein, 18 aa, synthetic construct
KTINGSGSPHSKAAMKQT

SEQ ID NO: 4422 - protein, 18 aa, synthetic construct
KTINGSGSPHSKAGRQQT

SEQ ID NO: 4423 - protein, 18 aa, synthetic construct
KTINGSGSPHSKAGRTQT

SEQ ID NO: 4424 - protein, 18 aa, synthetic construct
KTINGSGSPHSKAKSNQT

SEQ ID NO: 4425 - protein, 18 aa, synthetic construct
KTINGSGSPHSKALKTQT

SEQ ID NO: 4426 - protein, 18 aa, synthetic construct
KTINGSGSPHSKAPRTQT

SEQ ID NO: 4427 - protein, 18 aa, synthetic construct
KTINGSGSPHSKAQAART

SEQ ID NO: 4428 - protein, 18 aa, synthetic construct
KTINGSGSPHSKAQAILT

SEQ ID NO: 4429 - protein, 18 aa, synthetic construct
KTINGSGSPHSKAQCRGT

SEQ ID NO: 4430 - protein, 18 aa, synthetic construct
KTINGSGSPHSKAQGLRT

SEQ ID NO: 4431 - protein, 18 aa, synthetic construct
KTINGSGSPHSKAQKGVL

SEQ ID NO: 4432 - protein, 18 aa, synthetic construct
KTINGSGSPHSKAQKSNT

SEQ ID NO: 4433 - protein, 18 aa, synthetic construct
KTINGSGSPHSKAQNNKF

SEQ ID NO: 4434 - protein, 18 aa, synthetic construct
KTINGSGSPHSKAQNRRT

SEQ ID NO: 4435 - protein, 18 aa, synthetic construct
KTINGSGSPHSKAQPKQT

SEQ ID NO: 4436 - protein, 18 aa, synthetic construct
KTINGSGSPHSKAQRAPT

SEQ ID NO: 4437 - protein, 18 aa, synthetic construct
KTINGSGSPHSKAQREHT

SEQ ID NO: 4438 - protein, 18 aa, synthetic construct
KTINGSGSPHSKAQRFGT

SEQ ID NO: 4439 - protein, 18 aa, synthetic construct
KTINGSGSPHSKAQRPCT

SEQ ID NO: 4440 - protein, 18 aa, synthetic construct
KTINGSGSPHSKAQRQAT

SEQ ID NO: 4441 - protein, 18 aa, synthetic construct
KTINGSGSPHSKAQRQPT

SEQ ID NO: 4442 - protein, 18 aa, synthetic construct
KTINGSGSPHSKAQTKLT

SEQ ID NO: 4443 - protein, 18 aa, synthetic construct
KTINGSGSPHSKAQTTHT

SEQ ID NO: 4444 - protein, 18 aa, synthetic construct
KTINGSGSPHSKAQVQRT

SEQ ID NO: 4445 - protein, 18 aa, synthetic construct
KTINGSGSPHSKAQVVRT

SEQ ID NO: 4446 - protein, 18 aa, synthetic construct
KTINGSGSPHSKAQWPNT

SEQ ID NO: 4447 - protein, 18 aa, synthetic construct
KTINGSGSPHSKAQYPST

SEQ ID NO: 4448 - protein, 18 aa, synthetic construct
KTINGSGSPHSKARALQT

SEQ ID NO: 4449 - protein, 18 aa, synthetic construct
KTINGSGSPHSKARDQHT

SEQ ID NO: 4450 - protein, 18 aa, synthetic construct
KTINGSGSPHSKARFQQT

SEQ ID NO: 4451 - protein, 18 aa, synthetic construct
KTINGSGSPHSKARRTQT

SEQ ID NO: 4452 - protein, 18 aa, synthetic construct
KTINGSGSPHSKARSLQT

SEQ ID NO: 4453 - protein, 18 aa, synthetic construct
KTINGSGSPHSKARVIQT

SEQ ID NO: 4454 - protein, 18 aa, synthetic construct
KTINGSGSPHSKAWYLQT

SEQ ID NO: 4455 - protein, 18 aa, synthetic construct
KTINGSGSPHSKGGGQQT

SEQ ID NO: 4456 - protein, 18 aa, synthetic construct
KTINGSGSPHSKGSRQQT

SEQ ID NO: 4457 - protein, 18 aa, synthetic construct
KTINGSGSPHSKLQRQQT

SEQ ID NO: 4458 - protein, 18 aa, synthetic construct
KTINGSGSPHSKMLRQQT

SEQ ID NO: 4459 - protein, 18 aa, synthetic construct
KTINGSGSPHSKSSIKQT

SEQ ID NO: 4460 - protein, 18 aa, synthetic construct
KTINGSGSPHSKVRFQQT

SEQ ID NO: 4461 - protein, 18 aa, synthetic construct
KTINGSGSPHSVVWNQQT

SEQ ID NO: 4462 - protein, 18 aa, synthetic construct
KTINGSTSPHKLAQNQQP

SEQ ID NO: 4463 - protein, 18 aa, synthetic construct
KTINRHDSPHKSGQRPST

SEQ ID NO: 4464 - protein, 18 aa, synthetic construct
KTINRIMSPHSKAQNQQT

SEQ ID NO: 4465 - protein, 18 aa, synthetic construct
KTINTARSPHSKAQNQQT

SEQ ID NO: 4466 - protein, 18 aa, synthetic construct
KTISGHDSPHSKAQNQQT

SEQ ID NO: 4467 - protein, 18 aa, synthetic construct
KTISGSGSPHKSGQNQQT

SEQ ID NO: 4468 - protein, 18 aa, synthetic construct
KTITGHDSPHKSGQRLGT

SEQ ID NO: 4469 - protein, 18 aa, synthetic construct
KTITGSGSPHKSGQNQQT

SEQ ID NO: 4470 - protein, 18 aa, synthetic construct
KTIYGHDSPHKSGQRLGT

SEQ ID NO: 4471 - protein, 18 aa, synthetic construct
KTLNGHDSPHKSGQNLFL

SEQ ID NO: 4472 - protein, 18 aa, synthetic construct
KTLNGHDSPHKSGQNLSS

SEQ ID NO: 4473 - protein, 18 aa, synthetic construct
KTLSFHDSPHKSGQNQQS

SEQ ID NO: 4474 - protein, 18 aa, synthetic construct
KTSNGSGSPHSKAQNTMT

SEQ ID NO: 4475 - protein, 18 aa, synthetic construct
KTTNGHDSPHSKAQNQQT

SEQ ID NO: 4476 - protein, 18 aa, synthetic construct
KTVNGGGSPHSKAQNQQT

SEQ ID NO: 4477 - protein, 18 aa, synthetic construct
KTVNGHDSPHKSGQNVSL

SEQ ID NO: 4478 - protein, 18 aa, synthetic construct
KTVNGHDSPHKSGQRPST

SEQ ID NO: 4479 - protein, 18 aa, synthetic construct
KTVNGHDSPHKSGQTQQA

SEQ ID NO: 4480 - protein, 18 aa, synthetic construct
KTVNGHESPHSKAQNQQT

SEQ ID NO: 4481 - protein, 18 aa, synthetic construct
KTVNGSGSPHSKAQGLST

SEQ ID NO: 4482 - protein, 18 aa, synthetic construct
KTVNGSGSPHSKAQNVTS

SEQ ID NO: 4483 - protein, 18 aa, synthetic construct
KTVPASGSPHSKAQNQQT

SEQ ID NO: 4484 - protein, 18 aa, synthetic construct
NTINGSGSPHSKAHNQQT

SEQ ID NO: 4485 - protein, 18 aa, synthetic construct
TTINGGGSPHSKAQNQQT

SEQ ID NO: 4486 - protein, 8 aa, synthetic construct
HDSPHSKA

SEQ ID NO: 4487 - protein, 9 aa, synthetic construct
NGSGQNQQT

SEQ ID NO: 4488-4672 - skipped (185 entries)

SEQ ID NO: 4673 - DNA, 23 bp, synthetic construct
  source 1..23: mol_type = other DNA
acaaacaccattgtcacactcca

SEQ ID NO: 4674 - DNA, 71 bp, synthetic construct
  source 1..71: mol_type = other DNA
acaaacaccattgtcacactccacacaaacaccattgtcacactccacacaaacaccattgtcacactcca

SEQ ID NO: 4675 - DNA, 23 bp, synthetic construct
  source 1..23: mol_type = other DNA
tccataaagtaggaaacactaca

SEQ ID NO: 4676 - DNA, 22 bp, synthetic construct
  source 1..22: mol_type = other DNA
agtgaattctaccagtgccata

SEQ ID NO: 4677 - DNA, 24 bp, synthetic construct
  source 1..24: mol_type = other DNA
agtgtgagttctaccattgccaaa

SEQ ID NO: 4678 - DNA, 23 bp, synthetic construct
  source 1..23: mol_type = other DNA
agcaaaaatgtgctagtgccaaa

SEQ ID NO: 4679 - DNA, 22 bp, synthetic construct
  source 1..22: mol_type = other DNA
atacatacttctttacattcca

SEQ ID NO: 4680 - protein, 7 aa, synthetic construct
TLAVPFK

SEQ ID NO: 4681 - protein, 18 aa, synthetic construct
KTINGSGSPHSKAQARKT

SEQ ID NO: 4682 - protein, 18 aa, synthetic construct
KYIVGSGSPHSKAQNQQT

SEQ ID NO: 4683 - protein, 18 aa, synthetic construct
KTINGSGSPHSMYMNQQT

SEQ ID NO: 4684 - protein, 18 aa, synthetic construct
KTINGSGSPHSKAFYRQT

SEQ ID NO: 4685 - protein, 18 aa, synthetic construct
KTINGSGSPHSKLKRQQT

SEQ ID NO: 4686 - protein, 18 aa, synthetic construct
KTINGSGSPHSKRHRQQT

SEQ ID NO: 4687 - protein, 18 aa, synthetic construct
KTINGSGSPHSKAQKCIT

SEQ ID NO: 4688 - protein, 18 aa, synthetic construct
KTINGSGSPHSKWRLQQT

SEQ ID NO: 4689 - protein, 18 aa, synthetic construct
KTINGSGSPHSRCRNQQT

SEQ ID NO: 4690 - protein, 18 aa, synthetic construct
KTINGSGSPHSFTCNQQT

SEQ ID NO: 4691 - protein, 18 aa, synthetic construct
KTINGSGSPHSKFFIQQT

SEQ ID NO: 4692 - protein, 18 aa, synthetic construct
KTINGSGSPHSKAQYSRT

SEQ ID NO: 4693 - protein, 18 aa, synthetic construct
KTINGSGSPHCALQNQQT

SEQ ID NO: 4694 - protein, 13 aa, synthetic construct
  VARIANT 7: note = S, C, F, or V
  VARIANT 8: note = K, L, R, I, E, Y, V, or S
  VARIANT 9: note = A, R, L, G, I, Y, S, F, or W
  VARIANT 10: note = W, Q, R, G, L, V, S, or F
  VARIANT 11: note = N, Y, R, C, K, or L
  VARIANT 12: note = Q, G, K, R, T, L, or Y
  VARIANT 13: note = Q, L, R, or V
GSGSPHXXXXXXX

SEQ ID NO: 4695 - protein, 6 aa, synthetic construct
GSGSPH

SEQ ID NO: 4696 - protein, 11 aa, synthetic construct
  VARIANT 7: note = S, I, F, V, C, Y, W, R, P, L, Q, M, K, or G
  VARIANT 8: note = K, M, R, F, V, C, P, Y, L, W, G, N, S, T, I, or A
  VARIANT 9: note = A, Y, L, R, W, C, T, F, H, I, P, M, K, S, V, G, Q, or N
  VARIANT 10: note = Q, M, F, K, H, R, C, W, P, V, L, G, S, Y, I, A, T, D, N, or E
  VARIANT 11: note = A, N, Y, R, K, L, I, M, Q, S, C, W, F, T, G, V, or P
GSGSPHXXXXX

SEQ ID NO: 4697 - protein, 9 aa, synthetic construct
GSGSPHSKA

SEQ ID NO: 4698 - protein, 9 aa, synthetic construct
GHDSPHKSG

SEQ ID NO: 4699 - protein, 12 aa, synthetic construct
  VARIANT 1: note = T, M, A, C, I, R, L, D, F, V, Q, N, or H
  VARIANT 2: note = I, P, E, N, D, S, A, T, M, or Q
  VARIANT 3: note = N, E, G, Y, W, M, T, I, K, Q, F, S, V, A, or L
  VARIANT 4: note = G, D, R, or E
  VARIANT 5: note = H, Q, N, or D
  VARIANT 6: note = D or R
XXXXXXSPHKSG

SEQ ID NO: 4700 - protein, 4 aa, synthetic construct
SPHS

SEQ ID NO: 4701 - protein, 5 aa, synthetic construct
SPHSK

SEQ ID NO: 4702 - protein, 4 aa, synthetic construct
HDSP

SEQ ID NO: 4703 - protein, 5 aa, synthetic construct
HDSPH

SEQ ID NO: 4704 - protein, 5 aa, synthetic construct
SPHKS

SEQ ID NO: 4705 - protein, 5 aa, synthetic construct
SPHAR

SEQ ID NO: 4706 - protein, 5 aa, synthetic construct
SPHVK

SEQ ID NO: 4707 - protein, 5 aa, synthetic construct
SPHAS

SEQ ID NO: 4708 - protein, 5 aa, synthetic construct
SPHKK

SEQ ID NO: 4709 - protein, 5 aa, synthetic construct
SPHVR

SEQ ID NO: 4710 - protein, 5 aa, synthetic construct
SPHRK

SEQ ID NO: 4711 - protein, 5 aa, synthetic construct
SPHKT

SEQ ID NO: 4712 - protein, 5 aa, synthetic construct
SPHKF

SEQ ID NO: 4713 - protein, 5 aa, synthetic construct
SPHKI

SEQ ID NO: 4714 - protein, 5 aa, synthetic construct
SPHKL

SEQ ID NO: 4715 - protein, 5 aa, synthetic construct
SPHKY

SEQ ID NO: 4716 - protein, 5 aa, synthetic construct
SPHTR

SEQ ID NO: 4717 - protein, 5 aa, synthetic construct
SPHKR

SEQ ID NO: 4718 - protein, 5 aa, synthetic construct
SPHGA

SEQ ID NO: 4719 - protein, 5 aa, synthetic construct
SPHSR

SEQ ID NO: 4720 - protein, 5 aa, synthetic construct
SPHSL

SEQ ID NO: 4721 - protein, 5 aa, synthetic construct
SPHSS

SEQ ID NO: 4722 - protein, 5 aa, synthetic construct
SPHFL

SEQ ID NO: 4723 - protein, 5 aa, synthetic construct
SPHWK

SEQ ID NO: 4724 - protein, 5 aa, synthetic construct
SPHGK

SEQ ID NO: 4725 - protein, 5 aa, synthetic construct
SPHTK

SEQ ID NO: 4726 - protein, 5 aa, synthetic construct
SPHNK

SEQ ID NO: 4727 - protein, 5 aa, synthetic construct
SPHAK

SEQ ID NO: 4728 - protein, 5 aa, synthetic construct
SPHKH

SEQ ID NO: 4729 - protein, 5 aa, synthetic construct
SPHKM

SEQ ID NO: 4730 - protein, 5 aa, synthetic construct
SPHRS

SEQ ID NO: 4731 - protein, 6 aa, synthetic construct
SPHSKT

SEQ ID NO: 4732 - protein, 6 aa, synthetic construct
SPHSKG

SEQ ID NO: 4733 - protein, 6 aa, synthetic construct
SPHGKA

SEQ ID NO: 4734 - protein, 6 aa, synthetic construct
SPHNKA

SEQ ID NO: 4735 - protein, 6 aa, synthetic construct
SPHSKN

SEQ ID NO: 4736 - protein, 6 aa, synthetic construct
SPHAKA

SEQ ID NO: 4737 - protein, 6 aa, synthetic construct
SPHSKV

SEQ ID NO: 4738 - protein, 6 aa, synthetic construct
SPHKTG

SEQ ID NO: 4739 - protein, 6 aa, synthetic construct
SPHTKA

SEQ ID NO: 4740 - protein, 6 aa, synthetic construct
SPHKSL

SEQ ID NO: 4741 - protein, 6 aa, synthetic construct
SPHKSE

SEQ ID NO: 4742 - protein, 6 aa, synthetic construct
SPHKSV

SEQ ID NO: 4743 - protein, 6 aa, synthetic construct
SPHKSW

SEQ ID NO: 4744 - protein, 6 aa, synthetic construct
SPHKSN

SEQ ID NO: 4745 - protein, 6 aa, synthetic construct
SPHKHG

SEQ ID NO: 4746 - protein, 6 aa, synthetic construct
SPHKSQ

SEQ ID NO: 4747 - protein, 6 aa, synthetic construct
SPHKSK

SEQ ID NO: 4748 - protein, 6 aa, synthetic construct
SPHKLW

SEQ ID NO: 4749 - protein, 6 aa, synthetic construct
SPHWKG

SEQ ID NO: 4750 - protein, 6 aa, synthetic construct
SPHKMG

SEQ ID NO: 4751 - protein, 6 aa, synthetic construct
SPHKMA

SEQ ID NO: 4752 - protein, 5 aa, synthetic construct
SGSPH

SEQ ID NO: 4753 - protein, 5 aa, synthetic construct
QDSPH

SEQ ID NO: 4754 - protein, 5 aa, synthetic construct
RGSPH

SEQ ID NO: 4755 - protein, 5 aa, synthetic construct
SHSPH

SEQ ID NO: 4756 - protein, 5 aa, synthetic construct
QSSPH

SEQ ID NO: 4757 - protein, 5 aa, synthetic construct
DDSPH

SEQ ID NO: 4758 - protein, 5 aa, synthetic construct
HESPH

SEQ ID NO: 4759 - protein, 5 aa, synthetic construct
NYSPH

SEQ ID NO: 4760 - protein, 5 aa, synthetic construct
VGSPH

SEQ ID NO: 4761 - protein, 5 aa, synthetic construct
SCSPH

SEQ ID NO: 4762 - protein, 5 aa, synthetic construct
LLSPH

SEQ ID NO: 4763 - protein, 5 aa, synthetic construct
NGSPH

SEQ ID NO: 4764 - protein, 5 aa, synthetic construct
PGSPH

SEQ ID NO: 4765 - protein, 5 aa, synthetic construct
GGSPH

SEQ ID NO: 4766 - protein, 5 aa, synthetic construct
TGSPH

SEQ ID NO: 4767 - protein, 5 aa, synthetic construct
SVSPH

SEQ ID NO: 4768 - protein, 5 aa, synthetic construct
IGSPH

SEQ ID NO: 4769 - protein, 5 aa, synthetic construct
DGSPH

SEQ ID NO: 4770 - protein, 5 aa, synthetic construct
LGSPH

SEQ ID NO: 4771 - protein, 5 aa, synthetic construct
AGSPH

SEQ ID NO: 4772 - protein, 5 aa, synthetic construct
EGSPH

SEQ ID NO: 4773 - protein, 5 aa, synthetic construct
SASPH

SEQ ID NO: 4774 - protein, 5 aa, synthetic construct
YDSPH

SEQ ID NO: 4775 - protein, 5 aa, synthetic construct
HGSPH

SEQ ID NO: 4776 - protein, 5 aa, synthetic construct
RDSPH

SEQ ID NO: 4777 - protein, 5 aa, synthetic construct
NDSPH

SEQ ID NO: 4778 - protein, 5 aa, synthetic construct
PDSPH

SEQ ID NO: 4779 - protein, 5 aa, synthetic construct
MGSPH

SEQ ID NO: 4780 - protein, 5 aa, synthetic construct
QVSPH

SEQ ID NO: 4781 - protein, 5 aa, synthetic construct
HNSPH

SEQ ID NO: 4782 - protein, 5 aa, synthetic construct
HPSPH

SEQ ID NO: 4783 - protein, 5 aa, synthetic construct
HSSPH

SEQ ID NO: 4784 - protein, 6 aa, synthetic construct
GHDSPH

SEQ ID NO: 4785 - protein, 6 aa, synthetic construct
GQDSPH

SEQ ID NO: 4786 - protein, 6 aa, synthetic construct
VSGSPH

SEQ ID NO: 4787 - protein, 6 aa, synthetic construct
CSGSPH

SEQ ID NO: 4788 - protein, 6 aa, synthetic construct
GRGSPH

SEQ ID NO: 4789 - protein, 6 aa, synthetic construct
CSHSPH

SEQ ID NO: 4790 - protein, 6 aa, synthetic construct
GQSSPH

SEQ ID NO: 4791 - protein, 6 aa, synthetic construct
GSHSPH

SEQ ID NO: 4792 - protein, 6 aa, synthetic construct
GDDSPH

SEQ ID NO: 4793 - protein, 6 aa, synthetic construct
GHESPH

SEQ ID NO: 4794 - protein, 6 aa, synthetic construct
GNYSPH

SEQ ID NO: 4795 - protein, 6 aa, synthetic construct
RVGSPH

SEQ ID NO: 4796 - protein, 6 aa, synthetic construct
GSCSPH

SEQ ID NO: 4797 - protein, 6 aa, synthetic construct
GLLSPH

SEQ ID NO: 4798 - protein, 6 aa, synthetic construct
MSGSPH

SEQ ID NO: 4799 - protein, 6 aa, synthetic construct
RNGSPH

SEQ ID NO: 4800 - protein, 6 aa, synthetic construct
TSGSPH

SEQ ID NO: 4801 - protein, 6 aa, synthetic construct
ISGSPH

SEQ ID NO: 4802 - protein, 6 aa, synthetic construct
GPGSPH

SEQ ID NO: 4803 - protein, 6 aa, synthetic construct
ESGSPH

SEQ ID NO: 4804 - protein, 6 aa, synthetic construct
SSGSPH

SEQ ID NO: 4805 - protein, 6 aa, synthetic construct
GNGSPH

SEQ ID NO: 4806 - protein, 6 aa, synthetic construct
ASGSPH

SEQ ID NO: 4807 - protein, 6 aa, synthetic construct
NSGSPH

SEQ ID NO: 4808 - protein, 6 aa, synthetic construct
LSGSPH

SEQ ID NO: 4809 - protein, 6 aa, synthetic construct
GGGSPH

SEQ ID NO: 4810 - protein, 6 aa, synthetic construct
KSGSPH

SEQ ID NO: 4811 - protein, 6 aa, synthetic construct
HSGSPH

SEQ ID NO: 4812 - protein, 6 aa, synthetic construct
GTGSPH

SEQ ID NO: 4813 - protein, 6 aa, synthetic construct
PSGSPH

SEQ ID NO: 4814 - protein, 6 aa, synthetic construct
GSVSPH

SEQ ID NO: 4815 - protein, 6 aa, synthetic construct
RSGSPH

SEQ ID NO: 4816 - protein, 6 aa, synthetic construct
GIGSPH

SEQ ID NO: 4817 - protein, 6 aa, synthetic construct
WSGSPH

SEQ ID NO: 4818 - protein, 6 aa, synthetic construct
DSGSPH

SEQ ID NO: 4819 - protein, 6 aa, synthetic construct
IDGSPH

SEQ ID NO: 4820 - protein, 6 aa, synthetic construct
GLGSPH

SEQ ID NO: 4821 - protein, 6 aa, synthetic construct
DAGSPH

SEQ ID NO: 4822 - protein, 6 aa, synthetic construct
DGGSPH

SEQ ID NO: 4823 - protein, 6 aa, synthetic construct
MEGSPH

SEQ ID NO: 4824 - protein, 6 aa, synthetic construct
ENGSPH

SEQ ID NO: 4825 - protein, 6 aa, synthetic construct
GSASPH

SEQ ID NO: 4826 - protein, 6 aa, synthetic construct
KNGSPH

SEQ ID NO: 4827 - protein, 6 aa, synthetic construct
KEGSPH

SEQ ID NO: 4828 - protein, 6 aa, synthetic construct
AIGSPH

SEQ ID NO: 4829 - protein, 6 aa, synthetic construct
GYDSPH

SEQ ID NO: 4830 - protein, 6 aa, synthetic construct
GHGSPH

SEQ ID NO: 4831 - protein, 6 aa, synthetic construct
GRDSPH

SEQ ID NO: 4832 - protein, 6 aa, synthetic construct
GNDSPH

SEQ ID NO: 4833 - protein, 6 aa, synthetic construct
GPDSPH

SEQ ID NO: 4834 - protein, 6 aa, synthetic construct
GMGSPH

SEQ ID NO: 4835 - protein, 6 aa, synthetic construct
GQVSPH

SEQ ID NO: 4836 - protein, 6 aa, synthetic construct
GHNSPH

SEQ ID NO: 4837 - protein, 6 aa, synthetic construct
GHPSPH

SEQ ID NO: 4838 - protein, 6 aa, synthetic construct
GHSSPH

SEQ ID NO: 4839 - protein, 7 aa, synthetic construct
SGSPHSK

SEQ ID NO: 4840 - protein, 7 aa, synthetic construct
HDSPHKS

SEQ ID NO: 4841 - protein, 7 aa, synthetic construct
SGSPHAR

SEQ ID NO: 4842 - protein, 7 aa, synthetic construct
SGSPHVK

SEQ ID NO: 4843 - protein, 7 aa, synthetic construct
QDSPHKS

SEQ ID NO: 4844 - protein, 7 aa, synthetic construct
SGSPHKK

SEQ ID NO: 4845 - protein, 7 aa, synthetic construct
SGSPHVR

SEQ ID NO: 4846 - protein, 7 aa, synthetic construct
SGSPHAS

SEQ ID NO: 4847 - protein, 7 aa, synthetic construct
SGSPHRK

SEQ ID NO: 4848 - protein, 7 aa, synthetic construct
SGSPHKT

SEQ ID NO: 4849 - protein, 7 aa, synthetic construct
SHSPHKS

SEQ ID NO: 4850 - protein, 7 aa, synthetic construct
QSSPHRS

SEQ ID NO: 4851 - protein, 7 aa, synthetic construct
RGSPHAS

SEQ ID NO: 4852 - protein, 7 aa, synthetic construct
RGSPHSK

SEQ ID NO: 4853 - protein, 7 aa, synthetic construct
SGSPHKF

SEQ ID NO: 4854 - protein, 7 aa, synthetic construct
SGSPHKI

SEQ ID NO: 4855 - protein, 7 aa, synthetic construct
SGSPHKL

SEQ ID NO: 4856 - protein, 7 aa, synthetic construct
SGSPHKY

SEQ ID NO: 4857 - protein, 7 aa, synthetic construct
SGSPHTR

SEQ ID NO: 4858 - protein, 7 aa, synthetic construct
SHSPHKR

SEQ ID NO: 4859 - protein, 7 aa, synthetic construct
SGSPHGA

SEQ ID NO: 4860 - protein, 7 aa, synthetic construct
HDSPHKR

SEQ ID NO: 4861 - protein, 7 aa, synthetic construct
DDSPHKS

SEQ ID NO: 4862 - protein, 7 aa, synthetic construct
HESPHKS

SEQ ID NO: 4863 - protein, 7 aa, synthetic construct
NYSPHKI

SEQ ID NO: 4864 - protein, 7 aa, synthetic construct
SGSPHSR

SEQ ID NO: 4865 - protein, 7 aa, synthetic construct
SGSPHSL

SEQ ID NO: 4866 - protein, 7 aa, synthetic construct
SGSPHSS

SEQ ID NO: 4867 - protein, 7 aa, synthetic construct
VGSPHSK

SEQ ID NO: 4868 - protein, 7 aa, synthetic construct
SCSPHRK

SEQ ID NO: 4869 - protein, 7 aa, synthetic construct
SGSPHFL

SEQ ID NO: 4870 - protein, 7 aa, synthetic construct
LLSPHWK

SEQ ID NO: 4871 - protein, 7 aa, synthetic construct
NGSPHSK

SEQ ID NO: 4872 - protein, 7 aa, synthetic construct
PGSPHSK

SEQ ID NO: 4873 - protein, 7 aa, synthetic construct
GGSPHSK

SEQ ID NO: 4874 - protein, 7 aa, synthetic construct
TGSPHSK

SEQ ID NO: 4875 - protein, 7 aa, synthetic construct
SVSPHGK

SEQ ID NO: 4876 - protein, 7 aa, synthetic construct
SGSPHTK

SEQ ID NO: 4877 - protein, 7 aa, synthetic construct
IGSPHSK

SEQ ID NO: 4878 - protein, 7 aa, synthetic construct
DGSPHSK

SEQ ID NO: 4879 - protein, 7 aa, synthetic construct
SGSPHNK

SEQ ID NO: 4880 - protein, 7 aa, synthetic construct
LGSPHSK

SEQ ID NO: 4881 - protein, 7 aa, synthetic construct
AGSPHSK

SEQ ID NO: 4882 - protein, 7 aa, synthetic construct
EGSPHSK

SEQ ID NO: 4883 - protein, 7 aa, synthetic construct
SASPHSK

SEQ ID NO: 4884 - protein, 7 aa, synthetic construct
SGSPHAK

SEQ ID NO: 4885 - protein, 7 aa, synthetic construct
HDSPHKI

SEQ ID NO: 4886 - protein, 7 aa, synthetic construct
YDSPHKS

SEQ ID NO: 4887 - protein, 7 aa, synthetic construct
HDSPHKT

SEQ ID NO: 4888 - protein, 7 aa, synthetic construct
RGSPHKR

SEQ ID NO: 4889 - protein, 7 aa, synthetic construct
HGSPHSK

SEQ ID NO: 4890 - protein, 7 aa, synthetic construct
RDSPHKS

SEQ ID NO: 4891 - protein, 7 aa, synthetic construct
NDSPHKS

SEQ ID NO: 4892 - protein, 7 aa, synthetic construct
QDSPHKI

SEQ ID NO: 4893 - protein, 7 aa, synthetic construct
PDSPHKI

SEQ ID NO: 4894 - protein, 7 aa, synthetic construct
PDSPHKS

SEQ ID NO: 4895 - protein, 7 aa, synthetic construct
MGSPHSK

SEQ ID NO: 4896 - protein, 7 aa, synthetic construct
HDSPHKH

SEQ ID NO: 4897 - protein, 7 aa, synthetic construct
QVSPHKS

SEQ ID NO: 4898 - protein, 7 aa, synthetic construct
HNSPHKS

SEQ ID NO: 4899 - protein, 7 aa, synthetic construct
NGSPHKR

SEQ ID NO: 4900 - protein, 7 aa, synthetic construct
HDSPHKY

SEQ ID NO: 4901 - protein, 7 aa, synthetic construct
NDSPHKI

SEQ ID NO: 4902 - protein, 7 aa, synthetic construct
HDSPHKL

SEQ ID NO: 4903 - protein, 7 aa, synthetic construct
HPSPHWK

SEQ ID NO: 4904 - protein, 7 aa, synthetic construct
HDSPHKM

SEQ ID NO: 4905 - protein, 7 aa, synthetic construct
HSSPHRS

SEQ ID NO: 4906 - protein, 9 aa, synthetic construct
GSGSPHARM

SEQ ID NO: 4907 - protein, 9 aa, synthetic construct
GSGSPHVKS

SEQ ID NO: 4908 - protein, 9 aa, synthetic construct
GQDSPHKSG

SEQ ID NO: 4909 - protein, 9 aa, synthetic construct
GSGSPHASR

SEQ ID NO: 4910 - protein, 9 aa, synthetic construct
GSGSPHVKI

SEQ ID NO: 4911 - protein, 9 aa, synthetic construct
GSGSPHKKN

SEQ ID NO: 4912 - protein, 9 aa, synthetic construct
GSGSPHVRM

SEQ ID NO: 4913 - protein, 9 aa, synthetic construct
VSGSPHSKA

SEQ ID NO: 4914 - protein, 9 aa, synthetic construct
CSGSPHSKA

SEQ ID NO: 4915 - protein, 9 aa, synthetic construct
GSGSPHRKA

SEQ ID NO: 4916 - protein, 9 aa, synthetic construct
CSGSPHKTS

SEQ ID NO: 4917 - protein, 9 aa, synthetic construct
CSHSPHKSG

SEQ ID NO: 4918 - protein, 9 aa, synthetic construct
GQSSPHRSG

SEQ ID NO: 4919 - protein, 9 aa, synthetic construct
GRGSPHASR

SEQ ID NO: 4920 - protein, 9 aa, synthetic construct
GRGSPHSKA

SEQ ID NO: 4921 - protein, 9 aa, synthetic construct
GSGSPHKFG

SEQ ID NO: 4922 - protein, 9 aa, synthetic construct
GSGSPHKIG

SEQ ID NO: 4923 - protein, 9 aa, synthetic construct
GSGSPHKLG

SEQ ID NO: 4924 - protein, 9 aa, synthetic construct
GSGSPHKTS

SEQ ID NO: 4925 - protein, 9 aa, synthetic construct
GSGSPHKTT

SEQ ID NO: 4926 - protein, 9 aa, synthetic construct
GSGSPHKTY

SEQ ID NO: 4927 - protein, 9 aa, synthetic construct
GSGSPHKYG

SEQ ID NO: 4928 - protein, 9 aa, synthetic construct
GSGSPHSKD

SEQ ID NO: 4929 - protein, 9 aa, synthetic construct
GSGSPHSKP

SEQ ID NO: 4930 - protein, 9 aa, synthetic construct
GSGSPHTRG

SEQ ID NO: 4931 - protein, 9 aa, synthetic construct
GSGSPHVRG

SEQ ID NO: 4932 - protein, 9 aa, synthetic construct
GSHSPHKRG

SEQ ID NO: 4933 - protein, 9 aa, synthetic construct
GSHSPHKSG

SEQ ID NO: 4934 - protein, 9 aa, synthetic construct
VSGSPHASR

SEQ ID NO: 4935 - protein, 9 aa, synthetic construct
VSGSPHGAR

SEQ ID NO: 4936 - protein, 9 aa, synthetic construct
VSGSPHKFG

SEQ ID NO: 4937 - protein, 9 aa, synthetic construct
GHDSPHKRG

SEQ ID NO: 4938 - protein, 9 aa, synthetic construct
GDDSPHKSG

SEQ ID NO: 4939 - protein, 9 aa, synthetic construct
GHESPHKSA

SEQ ID NO: 4940 - protein, 9 aa, synthetic construct
GHDSPHKSA

SEQ ID NO: 4941 - protein, 9 aa, synthetic construct
GNYSPHKIG

SEQ ID NO: 4942 - protein, 9 aa, synthetic construct
GHDSPHKSR

SEQ ID NO: 4943 - protein, 9 aa, synthetic construct
GSGSPHSKL

SEQ ID NO: 4944 - protein, 9 aa, synthetic construct
GSGSPHSRA

SEQ ID NO: 4945 - protein, 9 aa, synthetic construct
GSGSPHSKR

SEQ ID NO: 4946 - protein, 9 aa, synthetic construct
GSGSPHSLR

SEQ ID NO: 4947 - protein, 9 aa, synthetic construct
GSGSPHSRG

SEQ ID NO: 4948 - protein, 9 aa, synthetic construct
GSGSPHSSR

SEQ ID NO: 4949 - protein, 9 aa, synthetic construct
RVGSPHSKA

SEQ ID NO: 4950 - protein, 9 aa, synthetic construct
GSCSPHRKA

SEQ ID NO: 4951 - protein, 9 aa, synthetic construct
GSGSPHFLR

SEQ ID NO: 4952 - protein, 9 aa, synthetic construct
GSGSPHSKW

SEQ ID NO: 4953 - protein, 9 aa, synthetic construct
GSGSPHSKS

SEQ ID NO: 4954 - protein, 9 aa, synthetic construct
GLLSPHWKA

SEQ ID NO: 4955 - protein, 9 aa, synthetic construct
GSGSPHVRR

SEQ ID NO: 4956 - protein, 9 aa, synthetic construct
GSGSPHSKV

SEQ ID NO: 4957 - protein, 9 aa, synthetic construct
MSGSPHSKA

SEQ ID NO: 4958 - protein, 9 aa, synthetic construct
RNGSPHSKA

SEQ ID NO: 4959 - protein, 9 aa, synthetic construct
TSGSPHSKA

SEQ ID NO: 4960 - protein, 9 aa, synthetic construct
ISGSPHSKA

SEQ ID NO: 4961 - protein, 9 aa, synthetic construct
GPGSPHSKA

SEQ ID NO: 4962 - protein, 9 aa, synthetic construct
GSGSPHSKT

SEQ ID NO: 4963 - protein, 9 aa, synthetic construct
ESGSPHSKA

SEQ ID NO: 4964 - protein, 9 aa, synthetic construct
SSGSPHSKA

SEQ ID NO: 4965 - protein, 9 aa, synthetic construct
GNGSPHSKA

SEQ ID NO: 4966 - protein, 9 aa, synthetic construct
ASGSPHSKA

SEQ ID NO: 4967 - protein, 9 aa, synthetic construct
NSGSPHSKA

SEQ ID NO: 4968 - protein, 9 aa, synthetic construct
LSGSPHSKA

SEQ ID NO: 4969 - protein, 9 aa, synthetic construct
GGGSPHSKA

SEQ ID NO: 4970 - protein, 9 aa, synthetic construct
KSGSPHSKA

SEQ ID NO: 4971 - protein, 9 aa, synthetic construct
GGGSPHSKS

SEQ ID NO: 4972 - protein, 9 aa, synthetic construct
GSGSPHSKG

SEQ ID NO: 4973 - protein, 9 aa, synthetic construct
HSGSPHSKA

SEQ ID NO: 4974 - protein, 9 aa, synthetic construct
GTGSPHSKA

SEQ ID NO: 4975 - protein, 9 aa, synthetic construct
PSGSPHSKA

SEQ ID NO: 4976 - protein, 9 aa, synthetic construct
GSVSPHGKA

SEQ ID NO: 4977 - protein, 9 aa, synthetic construct
RSGSPHSKA

SEQ ID NO: 4978 - protein, 9 aa, synthetic construct
GSGSPHTKA

SEQ ID NO: 4979 - protein, 9 aa, synthetic construct
GIGSPHSKA

SEQ ID NO: 4980 - protein, 9 aa, synthetic construct
WSGSPHSKA

SEQ ID NO: 4981 - protein, 9 aa, synthetic construct
DSGSPHSKA

SEQ ID NO: 4982 - protein, 9 aa, synthetic construct
IDGSPHSKA

SEQ ID NO: 4983 - protein, 9 aa, synthetic construct
GSGSPHNKA

SEQ ID NO: 4984 - protein, 9 aa, synthetic construct
GLGSPHSKS

SEQ ID NO: 4985 - protein, 9 aa, synthetic construct
DAGSPHSKA

SEQ ID NO: 4986 - protein, 9 aa, synthetic construct
DGGSPHSKA

SEQ ID NO: 4987 - protein, 9 aa, synthetic construct
MEGSPHSKA

SEQ ID NO: 4988 - protein, 9 aa, synthetic construct
ENGSPHSKA

SEQ ID NO: 4989 - protein, 9 aa, synthetic construct
GSASPHSKA

SEQ ID NO: 4990 - protein, 9 aa, synthetic construct
GNGSPHSKS

SEQ ID NO: 4991 - protein, 9 aa, synthetic construct
KNGSPHSKA

SEQ ID NO: 4992 - protein, 9 aa, synthetic construct
KEGSPHSKA

SEQ ID NO: 4993 - protein, 9 aa, synthetic construct
AIGSPHSKA

SEQ ID NO: 4994 - protein, 9 aa, synthetic construct
GSGSPHSKN

SEQ ID NO: 4995 - protein, 9 aa, synthetic construct
GSGSPHAKA

SEQ ID NO: 4996 - protein, 9 aa, synthetic construct
GHDSPHKIG

SEQ ID NO: 4997 - protein, 9 aa, synthetic construct
GYDSPHKSG

SEQ ID NO: 4998 - protein, 9 aa, synthetic construct
GHESPHKSG

SEQ ID NO: 4999 - protein, 9 aa, synthetic construct
GHDSPHKTG

SEQ ID NO: 5000 - protein, 9 aa, synthetic construct
GRGSPHKRG

SEQ ID NO: 5001 - protein, 9 aa, synthetic construct
GHDSPHKSL

SEQ ID NO: 5002 - protein, 9 aa, synthetic construct
GHGSPHSKA

SEQ ID NO: 5003 - protein, 9 aa, synthetic construct
GHDSPHKSE

SEQ ID NO: 5004 - protein, 9 aa, synthetic construct
GRDSPHKSG

SEQ ID NO: 5005 - protein, 9 aa, synthetic construct
GNDSPHKSV

SEQ ID NO: 5006 - protein, 9 aa, synthetic construct
GQDSPHKIG

SEQ ID NO: 5007 - protein, 9 aa, synthetic construct
GHDSPHKSV

SEQ ID NO: 5008 - protein, 9 aa, synthetic construct
GPDSPHKIG

SEQ ID NO: 5009 - protein, 9 aa, synthetic construct
GPDSPHKSG

SEQ ID NO: 5010 - protein, 9 aa, synthetic construct
GHDSPHKSW

SEQ ID NO: 5011 - protein, 9 aa, synthetic construct
GHDSPHKSN

SEQ ID NO: 5012 - protein, 9 aa, synthetic construct
GMGSPHSKT

SEQ ID NO: 5013 - protein, 9 aa, synthetic construct
GHDSPHKHG

SEQ ID NO: 5014 - protein, 9 aa, synthetic construct
GQVSPHKSG

SEQ ID NO: 5015 - protein, 9 aa, synthetic construct
GDDSPHKSV

SEQ ID NO: 5016 - protein, 9 aa, synthetic construct
GHNSPHKSG

SEQ ID NO: 5017 - protein, 9 aa, synthetic construct
GNGSPHKRG

SEQ ID NO: 5018 - protein, 9 aa, synthetic construct
GHDSPHKYG

SEQ ID NO: 5019 - protein, 9 aa, synthetic construct
GHDSPHKSQ

SEQ ID NO: 5020 - protein, 9 aa, synthetic construct
GNDSPHKIG

SEQ ID NO: 5021 - protein, 9 aa, synthetic construct
GHDSPHKSK

SEQ ID NO: 5022 - protein, 9 aa, synthetic construct
GHDSPHKLW

SEQ ID NO: 5023 - protein, 9 aa, synthetic construct
GHPSPHWKG

SEQ ID NO: 5024 - protein, 9 aa, synthetic construct
GHDSPHKMG

SEQ ID NO: 5025 - protein, 9 aa, synthetic construct
GHDSPHKMA

SEQ ID NO: 5026 - protein, 9 aa, synthetic construct
GHSSPHRSG

SEQ ID NO: 5027 - protein, 8 aa, synthetic construct
SGSPHKYG

SEQ ID NO: 5028 - protein, 4 aa, synthetic construct
QNQQ

SEQ ID NO: 5029 - protein, 4 aa, synthetic construct
WNQQ

SEQ ID NO: 5030 - protein, 4 aa, synthetic construct
QYYV

SEQ ID NO: 5031 - protein, 4 aa, synthetic construct
RRQQ

SEQ ID NO: 5032 - protein, 4 aa, synthetic construct
GCGQ

SEQ ID NO: 5033 - protein, 4 aa, synthetic construct
LRQQ

SEQ ID NO: 5034 - protein, 4 aa, synthetic construct
RNQQ

SEQ ID NO: 5035 - protein, 4 aa, synthetic construct
VNQQ

SEQ ID NO: 5036 - protein, 4 aa, synthetic construct
FRLQ

SEQ ID NO: 5037 - protein, 4 aa, synthetic construct
FNQQ

SEQ ID NO: 5038 - protein, 4 aa, synthetic construct
LLQQ

SEQ ID NO: 5039 - protein, 4 aa, synthetic construct
SNQQ

SEQ ID NO: 5040 - protein, 4 aa, synthetic construct
RLQQ

SEQ ID NO: 5041 - protein, 4 aa, synthetic construct
LNQQ

SEQ ID NO: 5042 - protein, 4 aa, synthetic construct
QRKL

SEQ ID NO: 5043 - protein, 4 aa, synthetic construct
LRRQ

SEQ ID NO: 5044 - protein, 4 aa, synthetic construct
QRLR

SEQ ID NO: 5045 - protein, 4 aa, synthetic construct
QRRL

SEQ ID NO: 5046 - protein, 4 aa, synthetic construct
RRLQ

SEQ ID NO: 5047 - protein, 4 aa, synthetic construct
RLRQ

SEQ ID NO: 5048 - protein, 4 aa, synthetic construct
SKRQ

SEQ ID NO: 5049 - protein, 4 aa, synthetic construct
QLYR

SEQ ID NO: 5050 - protein, 4 aa, synthetic construct
QLTV

SEQ ID NO: 5051 - protein, 4 aa, synthetic construct
QNKQ

SEQ ID NO: 5052 - protein, 4 aa, synthetic construct
KNQQ

SEQ ID NO: 5053 - protein, 4 aa, synthetic construct
QKQQ

SEQ ID NO: 5054 - protein, 4 aa, synthetic construct
QTQQ

SEQ ID NO: 5055 - protein, 4 aa, synthetic construct
QNHQ

SEQ ID NO: 5056 - protein, 4 aa, synthetic construct
QHQQ

SEQ ID NO: 5057 - protein, 4 aa, synthetic construct
QNQH

SEQ ID NO: 5058 - protein, 4 aa, synthetic construct
QHRQ

SEQ ID NO: 5059 - protein, 4 aa, synthetic construct
LTQQ

SEQ ID NO: 5060 - protein, 4 aa, synthetic construct
QNQW

SEQ ID NO: 5061 - protein, 4 aa, synthetic construct
QNTH

SEQ ID NO: 5062 - protein, 4 aa, synthetic construct
RRRQ

SEQ ID NO: 5063 - protein, 4 aa, synthetic construct
QYQQ

SEQ ID NO: 5064 - protein, 4 aa, synthetic construct
QNDQ

SEQ ID NO: 5065 - protein, 4 aa, synthetic construct
QNRH

SEQ ID NO: 5066 - protein, 4 aa, synthetic construct
RDQQ

SEQ ID NO: 5067 - protein, 4 aa, synthetic construct
PNLQ

SEQ ID NO: 5068 - protein, 4 aa, synthetic construct
HVRQ

SEQ ID NO: 5069 - protein, 4 aa, synthetic construct
PNQH

SEQ ID NO: 5070 - protein, 4 aa, synthetic construct
HNQQ

SEQ ID NO: 5071 - protein, 4 aa, synthetic construct
QSQQ

SEQ ID NO: 5072 - protein, 4 aa, synthetic construct
QPAK

SEQ ID NO: 5073 - protein, 4 aa, synthetic construct
QNLA

SEQ ID NO: 5074 - protein, 4 aa, synthetic construct
QNQL

SEQ ID NO: 5075 - protein, 4 aa, synthetic construct
QGQQ

SEQ ID NO: 5076 - protein, 4 aa, synthetic construct
LNRQ

SEQ ID NO: 5077 - protein, 4 aa, synthetic construct
QNPP

SEQ ID NO: 5078 - protein, 4 aa, synthetic construct
QNLQ

SEQ ID NO: 5079 - protein, 4 aa, synthetic construct
QDQE

SEQ ID NO: 5080 - protein, 4 aa, synthetic construct
QDQQ

SEQ ID NO: 5081 - protein, 4 aa, synthetic construct
HWQQ

SEQ ID NO: 5082 - protein, 4 aa, synthetic construct
PNQQ

SEQ ID NO: 5083 - protein, 4 aa, synthetic construct
PEQQ

SEQ ID NO: 5084 - protein, 4 aa, synthetic construct
QRTM

SEQ ID NO: 5085 - protein, 4 aa, synthetic construct
LHQH

SEQ ID NO: 5086 - protein, 4 aa, synthetic construct
QHRI

SEQ ID NO: 5087 - protein, 4 aa, synthetic construct
QYIH

SEQ ID NO: 5088 - protein, 4 aa, synthetic construct
QKFE

SEQ ID NO: 5089 - protein, 4 aa, synthetic construct
QFPS

SEQ ID NO: 5090 - protein, 4 aa, synthetic construct
QNPL

SEQ ID NO: 5091 - protein, 4 aa, synthetic construct
QAIK

SEQ ID NO: 5092 - protein, 4 aa, synthetic construct
QNRQ

SEQ ID NO: 5093 - protein, 4 aa, synthetic construct
QYQH

SEQ ID NO: 5094 - protein, 4 aa, synthetic construct
QNPQ

SEQ ID NO: 5095 - protein, 4 aa, synthetic construct
QHQL

SEQ ID NO: 5096 - protein, 4 aa, synthetic construct
QSPP

SEQ ID NO: 5097 - protein, 4 aa, synthetic construct
QAKL

SEQ ID NO: 5098 - protein, 4 aa, synthetic construct
KSQQ

SEQ ID NO: 5099 - protein, 4 aa, synthetic construct
QDRP

SEQ ID NO: 5100 - protein, 4 aa, synthetic construct
QNLG

SEQ ID NO: 5101 - protein, 4 aa, synthetic construct
QAFH

SEQ ID NO: 5102 - protein, 4 aa, synthetic construct
QNAQ

SEQ ID NO: 5103 - protein, 4 aa, synthetic construct
HNQL

SEQ ID NO: 5104 - protein, 4 aa, synthetic construct
QKLN

SEQ ID NO: 5105 - protein, 4 aa, synthetic construct
QNVQ

SEQ ID NO: 5106 - protein, 4 aa, synthetic construct
QAQQ

SEQ ID NO: 5107 - protein, 4 aa, synthetic construct
QTPP

SEQ ID NO: 5108 - protein, 4 aa, synthetic construct
QPPA

SEQ ID NO: 5109 - protein, 4 aa, synthetic construct
QERP

SEQ ID NO: 5110 - protein, 4 aa, synthetic construct
QDLQ

SEQ ID NO: 5111 - protein, 4 aa, synthetic construct
QAMH

SEQ ID NO: 5112 - protein, 4 aa, synthetic construct
QHPS

SEQ ID NO: 5113 - protein, 4 aa, synthetic construct
PGLQ

SEQ ID NO: 5114 - protein, 4 aa, synthetic construct
QGIR

SEQ ID NO: 5115 - protein, 4 aa, synthetic construct
QAPA

SEQ ID NO: 5116 - protein, 4 aa, synthetic construct
QIPP

SEQ ID NO: 5117 - protein, 4 aa, synthetic construct
QTQL

SEQ ID NO: 5118 - protein, 4 aa, synthetic construct
QAPS

SEQ ID NO: 5119 - protein, 4 aa, synthetic construct
QNTY

SEQ ID NO: 5120 - protein, 4 aa, synthetic construct
QDKQ

SEQ ID NO: 5121 - protein, 4 aa, synthetic construct
QNHL

SEQ ID NO: 5122 - protein, 4 aa, synthetic construct
QIGM

SEQ ID NO: 5123 - protein, 4 aa, synthetic construct
LNKQ

SEQ ID NO: 5124 - protein, 4 aa, synthetic construct
PNQL

SEQ ID NO: 5125 - protein, 4 aa, synthetic construct
QLQQ

SEQ ID NO: 5126 - protein, 4 aa, synthetic construct
QRMS

SEQ ID NO: 5127 - protein, 4 aa, synthetic construct
QGIL

SEQ ID NO: 5128 - protein, 4 aa, synthetic construct
QDRQ

SEQ ID NO: 5129 - protein, 4 aa, synthetic construct
RDWQ

SEQ ID NO: 5130 - protein, 4 aa, synthetic construct
QERS

SEQ ID NO: 5131 - protein, 4 aa, synthetic construct
QNYQ

SEQ ID NO: 5132 - protein, 4 aa, synthetic construct
QRTC

SEQ ID NO: 5133 - protein, 4 aa, synthetic construct
QIGH

SEQ ID NO: 5134 - protein, 4 aa, synthetic construct
QGAI

SEQ ID NO: 5135 - protein, 4 aa, synthetic construct
QVPP

SEQ ID NO: 5136 - protein, 4 aa, synthetic construct
QVQQ

SEQ ID NO: 5137 - protein, 4 aa, synthetic construct
LMRQ

SEQ ID NO: 5138 - protein, 4 aa, synthetic construct
QYSV

SEQ ID NO: 5139 - protein, 4 aa, synthetic construct
QAIT

SEQ ID NO: 5140 - protein, 4 aa, synthetic construct
QKTL

SEQ ID NO: 5141 - protein, 4 aa, synthetic construct
QLHH

SEQ ID NO: 5142 - protein, 4 aa, synthetic construct
QNII

SEQ ID NO: 5143 - protein, 4 aa, synthetic construct
QGHH

SEQ ID NO: 5144 - protein, 4 aa, synthetic construct
QSKV

SEQ ID NO: 5145 - protein, 4 aa, synthetic construct
QLPS

SEQ ID NO: 5146 - protein, 4 aa, synthetic construct
IGKQ

SEQ ID NO: 5147 - protein, 4 aa, synthetic construct
QAIH

SEQ ID NO: 5148 - protein, 4 aa, synthetic construct
QHGL

SEQ ID NO: 5149 - protein, 4 aa, synthetic construct
QFMC

SEQ ID NO: 5150 - protein, 4 aa, synthetic construct
QNQM

SEQ ID NO: 5151 - protein, 4 aa, synthetic construct
QHLQ

SEQ ID NO: 5152 - protein, 4 aa, synthetic construct
QPAR

SEQ ID NO: 5153 - protein, 4 aa, synthetic construct
QSLQ

SEQ ID NO: 5154 - protein, 4 aa, synthetic construct
QSQL

SEQ ID NO: 5155 - protein, 4 aa, synthetic construct
HSQQ

SEQ ID NO: 5156 - protein, 4 aa, synthetic construct
QMPS

SEQ ID NO: 5157 - protein, 4 aa, synthetic construct
QGSL

SEQ ID NO: 5158 - protein, 4 aa, synthetic construct
QVPA

SEQ ID NO: 5159 - protein, 4 aa, synthetic construct
HYQQ

SEQ ID NO: 5160 - protein, 4 aa, synthetic construct
QVPS

SEQ ID NO: 5161 - protein, 4 aa, synthetic construct
RGEQ

SEQ ID NO: 5162 - protein, 4 aa, synthetic construct
PGQQ

SEQ ID NO: 5163 - protein, 4 aa, synthetic construct
LEQQ

SEQ ID NO: 5164 - protein, 4 aa, synthetic construct
QNQS

SEQ ID NO: 5165 - protein, 4 aa, synthetic construct
QKVI

SEQ ID NO: 5166 - protein, 4 aa, synthetic construct
QNND

SEQ ID NO: 5167 - protein, 4 aa, synthetic construct
QSVH

SEQ ID NO: 5168 - protein, 4 aa, synthetic construct
QPLG

SEQ ID NO: 5169 - protein, 4 aa, synthetic construct
HNQE

SEQ ID NO: 5170 - protein, 4 aa, synthetic construct
QIQQ

SEQ ID NO: 5171 - protein, 4 aa, synthetic construct
QVRN

SEQ ID NO: 5172 - protein, 4 aa, synthetic construct
PSNQ

SEQ ID NO: 5173 - protein, 4 aa, synthetic construct
QVGH

SEQ ID NO: 5174 - protein, 4 aa, synthetic construct
QRDI

SEQ ID NO: 5175 - protein, 4 aa, synthetic construct
QMPN

SEQ ID NO: 5176 - protein, 4 aa, synthetic construct
RGLQ

SEQ ID NO: 5177 - protein, 4 aa, synthetic construct
PSLQ

SEQ ID NO: 5178 - protein, 4 aa, synthetic construct
QRDQ

SEQ ID NO: 5179 - protein, 4 aa, synthetic construct
QAKG

SEQ ID NO: 5180 - protein, 4 aa, synthetic construct
QSAH

SEQ ID NO: 5181 - protein, 4 aa, synthetic construct
QSTM

SEQ ID NO: 5182 - protein, 4 aa, synthetic construct
QREM

SEQ ID NO: 5183 - protein, 4 aa, synthetic construct
QYRA

SEQ ID NO: 5184 - protein, 4 aa, synthetic construct
QRQQ

SEQ ID NO: 5185 - protein, 4 aa, synthetic construct
QWQQ

SEQ ID NO: 5186 - protein, 4 aa, synthetic construct
QRMN

SEQ ID NO: 5187 - protein, 4 aa, synthetic construct
GDSQ

SEQ ID NO: 5188 - protein, 4 aa, synthetic construct
QKIS

SEQ ID NO: 5189 - protein, 4 aa, synthetic construct
PSMQ

SEQ ID NO: 5190 - protein, 4 aa, synthetic construct
SPRQ

SEQ ID NO: 5191 - protein, 4 aa, synthetic construct
MEQQ

SEQ ID NO: 5192 - protein, 4 aa, synthetic construct
QYQN

SEQ ID NO: 5193 - protein, 4 aa, synthetic construct
QIRQ

SEQ ID NO: 5194 - protein, 4 aa, synthetic construct
QSVQ

SEQ ID NO: 5195 - protein, 4 aa, synthetic construct
RSQQ

SEQ ID NO: 5196 - protein, 4 aa, synthetic construct
QNKL

SEQ ID NO: 5197 - protein, 4 aa, synthetic construct
QIQH

SEQ ID NO: 5198 - protein, 4 aa, synthetic construct
PRQQ

SEQ ID NO: 5199 - protein, 4 aa, synthetic construct
HTQQ

SEQ ID NO: 5200 - protein, 4 aa, synthetic construct
QRQH

SEQ ID NO: 5201 - protein, 4 aa, synthetic construct
RNQE

SEQ ID NO: 5202 - protein, 4 aa, synthetic construct
QSKQ

SEQ ID NO: 5203 - protein, 4 aa, synthetic construct
QNQP

SEQ ID NO: 5204 - protein, 4 aa, synthetic construct
QSPQ

SEQ ID NO: 5205 - protein, 4 aa, synthetic construct
QTRQ

SEQ ID NO: 5206 - protein, 4 aa, synthetic construct
QNLH

SEQ ID NO: 5207 - protein, 4 aa, synthetic construct
QNQE

SEQ ID NO: 5208 - protein, 4 aa, synthetic construct
LNQP

SEQ ID NO: 5209 - protein, 4 aa, synthetic construct
QNQD

SEQ ID NO: 5210 - protein, 4 aa, synthetic construct
QNLL

SEQ ID NO: 5211 - protein, 4 aa, synthetic construct
QLVI

SEQ ID NO: 5212 - protein, 4 aa, synthetic construct
RTQE

SEQ ID NO: 5213 - protein, 4 aa, synthetic construct
QTHQ

SEQ ID NO: 5214 - protein, 4 aa, synthetic construct
QDQH

SEQ ID NO: 5215 - protein, 4 aa, synthetic construct
QSQH

SEQ ID NO: 5216 - protein, 4 aa, synthetic construct
VRQQ

SEQ ID NO: 5217 - protein, 4 aa, synthetic construct
AWQQ

SEQ ID NO: 5218 - protein, 4 aa, synthetic construct
QSVP

SEQ ID NO: 5219 - protein, 4 aa, synthetic construct
QNIQ

SEQ ID NO: 5220 - protein, 4 aa, synthetic construct
LDQQ

SEQ ID NO: 5221 - protein, 4 aa, synthetic construct
PDQQ

SEQ ID NO: 5222 - protein, 4 aa, synthetic construct
ESQQ

SEQ ID NO: 5223 - protein, 4 aa, synthetic construct
QRQL

SEQ ID NO: 5224 - protein, 4 aa, synthetic construct
QIIV

SEQ ID NO: 5225 - protein, 4 aa, synthetic construct
QKQS

SEQ ID NO: 5226 - protein, 4 aa, synthetic construct
QSHQ

SEQ ID NO: 5227 - protein, 4 aa, synthetic construct
QFVV

SEQ ID NO: 5228 - protein, 4 aa, synthetic construct
QSQP

SEQ ID NO: 5229 - protein, 4 aa, synthetic construct
QNEQ

SEQ ID NO: 5230 - protein, 4 aa, synthetic construct
INQQ

SEQ ID NO: 5231 - protein, 4 aa, synthetic construct
RNRQ

SEQ ID NO: 5232 - protein, 4 aa, synthetic construct
RDQK

SEQ ID NO: 5233 - protein, 4 aa, synthetic construct
QWKR

SEQ ID NO: 5234 - protein, 4 aa, synthetic construct
ENRQ

SEQ ID NO: 5235 - protein, 4 aa, synthetic construct
QTQP

SEQ ID NO: 5236 - protein, 4 aa, synthetic construct
QKQL

SEQ ID NO: 5237 - protein, 4 aa, synthetic construct
RNQL

SEQ ID NO: 5238 - protein, 4 aa, synthetic construct
ISIQ

SEQ ID NO: 5239 - protein, 4 aa, synthetic construct
QTVC

SEQ ID NO: 5240 - protein, 4 aa, synthetic construct
QQIM

SEQ ID NO: 5241 - protein, 4 aa, synthetic construct
LNHQ

SEQ ID NO: 5242 - protein, 4 aa, synthetic construct
QNQA

SEQ ID NO: 5243 - protein, 4 aa, synthetic construct
QMIH

SEQ ID NO: 5244 - protein, 4 aa, synthetic construct
RNHQ

SEQ ID NO: 5245 - protein, 4 aa, synthetic construct
QKMN

SEQ ID NO: 5246 - protein, 17 aa, synthetic construct
TINGSGSPHKYGQNQQT

SEQ ID NO: 5247 - protein, 7 aa, synthetic construct
SLLWNQQ

SEQ ID NO: 5248 - protein, 7 aa, synthetic construct
SKAQYYV

SEQ ID NO: 5249 - protein, 7 aa, synthetic construct
SKLRRQQ

SEQ ID NO: 5250 - protein, 7 aa, synthetic construct
SIWQNQQ

SEQ ID NO: 5251 - protein, 7 aa, synthetic construct
SKAGCGQ

SEQ ID NO: 5252 - protein, 7 aa, synthetic construct
SRAQNQQ

SEQ ID NO: 5253 - protein, 7 aa, synthetic construct
SKRLRQQ

SEQ ID NO: 5254 - protein, 7 aa, synthetic construct
SLRRNQQ

SEQ ID NO: 5255 - protein, 7 aa, synthetic construct
SRGRNQQ

SEQ ID NO: 5256 - protein, 7 aa, synthetic construct
SEIVNQQ

SEQ ID NO: 5257 - protein, 7 aa, synthetic construct
SSRRNQQ

SEQ ID NO: 5258 - protein, 7 aa, synthetic construct
CLLQNQQ

SEQ ID NO: 5259 - protein, 7 aa, synthetic construct
SKAFRLQ

SEQ ID NO: 5260 - protein, 7 aa, synthetic construct
CLAQNQQ

SEQ ID NO: 5261 - protein, 7 aa, synthetic construct
FLRQNQQ

SEQ ID NO: 5262 - protein, 7 aa, synthetic construct
SLRFNQQ

SEQ ID NO: 5263 - protein, 7 aa, synthetic construct
SYLRNQQ

SEQ ID NO: 5264 - protein, 7 aa, synthetic construct
CSLQNQQ

SEQ ID NO: 5265 - protein, 7 aa, synthetic construct
VLWQNQQ

SEQ ID NO: 5266 - protein, 7 aa, synthetic construct
SKWLLQQ

SEQ ID NO: 5267 - protein, 7 aa, synthetic construct
SLWSNQQ

SEQ ID NO: 5268 - protein, 7 aa, synthetic construct
SKRRLQQ

SEQ ID NO: 5269 - protein, 7 aa, synthetic construct
SVYLNQQ

SEQ ID NO: 5270 - protein, 7 aa, synthetic construct
SLWLNQQ

SEQ ID NO: 5271 - protein, 7 aa, synthetic construct
SKAQRKL

SEQ ID NO: 5272 - protein, 7 aa, synthetic construct
SKALRRQ

SEQ ID NO: 5273 - protein, 7 aa, synthetic construct
SKAQRLR

SEQ ID NO: 5274 - protein, 7 aa, synthetic construct
SKAQNQQ

SEQ ID NO: 5275 - protein, 7 aa, synthetic construct
SKAQRRL

SEQ ID NO: 5276 - protein, 7 aa, synthetic construct
SKARRQQ

SEQ ID NO: 5277 - protein, 7 aa, synthetic construct
SKARRLQ

SEQ ID NO: 5278 - protein, 7 aa, synthetic construct
SKSRRQQ

SEQ ID NO: 5279 - protein, 7 aa, synthetic construct
SKARLRQ

SEQ ID NO: 5280 - protein, 7 aa, synthetic construct
SKASKRQ

SEQ ID NO: 5281 - protein, 7 aa, synthetic construct
VRRQNQQ

SEQ ID NO: 5282 - protein, 7 aa, synthetic construct
SKAQLYR

SEQ ID NO: 5283 - protein, 7 aa, synthetic construct
SLFRNQQ

SEQ ID NO: 5284 - protein, 7 aa, synthetic construct
SKAQLTV

SEQ ID NO: 5285 - protein, 13 aa, synthetic construct
GSGSPHSLLWNQQ

SEQ ID NO: 5286 - protein, 13 aa, synthetic construct
GSGSPHSIWQNQQ

SEQ ID NO: 5287 - protein, 13 aa, synthetic construct
GSGSPHSEIVNQQ

SEQ ID NO: 5288 - protein, 13 aa, synthetic construct
GSGSPHCLLQNQQ

SEQ ID NO: 5289 - protein, 13 aa, synthetic construct
GSGSPHCLAQNQQ

SEQ ID NO: 5290 - protein, 13 aa, synthetic construct
GSGSPHSYLRNQQ

SEQ ID NO: 5291 - protein, 13 aa, synthetic construct
GSGSPHCSLQNQQ

SEQ ID NO: 5292 - protein, 13 aa, synthetic construct
GSGSPHVLWQNQQ

SEQ ID NO: 5293 - protein, 13 aa, synthetic construct
GSGSPHSLWSNQQ

SEQ ID NO: 5294 - protein, 13 aa, synthetic construct
GSGSPHSVYLNQQ

SEQ ID NO: 5295 - protein, 13 aa, synthetic construct
GSGSPHSLWLNQQ

SEQ ID NO: 5296 - protein, 13 aa, synthetic construct
GSGSPHSLFRNQQ

SEQ ID NO: 5297 - protein, 6 aa, synthetic construct
TINGHD

SEQ ID NO: 5298 - protein, 6 aa, synthetic construct
MPEGHD

SEQ ID NO: 5299 - protein, 6 aa, synthetic construct
MEGGHD

SEQ ID NO: 5300 - protein, 6 aa, synthetic construct
MEYGHD

SEQ ID NO: 5301 - protein, 6 aa, synthetic construct
AEWGHD

SEQ ID NO: 5302 - protein, 6 aa, synthetic construct
CEWGHD

SEQ ID NO: 5303 - protein, 6 aa, synthetic construct
ANNGQD

SEQ ID NO: 5304 - protein, 6 aa, synthetic construct
IPEGHD

SEQ ID NO: 5305 - protein, 6 aa, synthetic construct
ADMGHD

SEQ ID NO: 5306 - protein, 6 aa, synthetic construct
IEYGHD

SEQ ID NO: 5307 - protein, 6 aa, synthetic construct
ADYGHD

SEQ ID NO: 5308 - protein, 6 aa, synthetic construct
IETGHD

SEQ ID NO: 5309 - protein, 6 aa, synthetic construct
MEWGHD

SEQ ID NO: 5310 - protein, 6 aa, synthetic construct
CEYGHD

SEQ ID NO: 5311 - protein, 6 aa, synthetic construct
RINGHD

SEQ ID NO: 5312 - protein, 6 aa, synthetic construct
MEIGHD

SEQ ID NO: 5313 - protein, 6 aa, synthetic construct
LEYGHD

SEQ ID NO: 5314 - protein, 6 aa, synthetic construct
ADWGHD

SEQ ID NO: 5315 - protein, 6 aa, synthetic construct
IEIGHD

SEQ ID NO: 5316 - protein, 6 aa, synthetic construct
TIKDND

SEQ ID NO: 5317 - protein, 6 aa, synthetic construct
DIMGHD

SEQ ID NO: 5318 - protein, 6 aa, synthetic construct
FEQGHD

SEQ ID NO: 5319 - protein, 6 aa, synthetic construct
MEFGHD

SEQ ID NO: 5320 - protein, 6 aa, synthetic construct
CDQGHD

SEQ ID NO: 5321 - protein, 6 aa, synthetic construct
LPEGHD

SEQ ID NO: 5322 - protein, 6 aa, synthetic construct
IENGHD

SEQ ID NO: 5323 - protein, 6 aa, synthetic construct
MESGHD

SEQ ID NO: 5324 - protein, 6 aa, synthetic construct
AEIGHD

SEQ ID NO: 5325 - protein, 6 aa, synthetic construct
VEYGHD

SEQ ID NO: 5326 - protein, 6 aa, synthetic construct
TSNGDD

SEQ ID NO: 5327 - protein, 6 aa, synthetic construct
IEVGHD

SEQ ID NO: 5328 - protein, 6 aa, synthetic construct
MEMGHD

SEQ ID NO: 5329 - protein, 6 aa, synthetic construct
AEVGHD

SEQ ID NO: 5330 - protein, 6 aa, synthetic construct
MDAGHD

SEQ ID NO: 5331 - protein, 6 aa, synthetic construct
VEWGHD

SEQ ID NO: 5332 - protein, 6 aa, synthetic construct
AEQGHD

SEQ ID NO: 5333 - protein, 6 aa, synthetic construct
LEWGHD

SEQ ID NO: 5334 - protein, 6 aa, synthetic construct
MELGHD

SEQ ID NO: 5335 - protein, 6 aa, synthetic construct
METGHD

SEQ ID NO: 5336 - protein, 6 aa, synthetic construct
MEAGHD

SEQ ID NO: 5337 - protein, 6 aa, synthetic construct
TINRQR

SEQ ID NO: 5338 - protein, 6 aa, synthetic construct
IESGHD

SEQ ID NO: 5339 - protein, 6 aa, synthetic construct
TAKDHD

SEQ ID NO: 5340 - protein, 6 aa, synthetic construct
MEVGHD

SEQ ID NO: 5341 - protein, 6 aa, synthetic construct
CEIGHD

SEQ ID NO: 5342 - protein, 6 aa, synthetic construct
ATNGHD

SEQ ID NO: 5343 - protein, 6 aa, synthetic construct
MDGGHD

SEQ ID NO: 5344 - protein, 6 aa, synthetic construct
QEVGHD

SEQ ID NO: 5345 - protein, 6 aa, synthetic construct
ADQGHD

SEQ ID NO: 5346 - protein, 6 aa, synthetic construct
NMNGHD

SEQ ID NO: 5347 - protein, 6 aa, synthetic construct
TPWEHD

SEQ ID NO: 5348 - protein, 6 aa, synthetic construct
IEMGHD

SEQ ID NO: 5349 - protein, 6 aa, synthetic construct
TANEHD

SEQ ID NO: 5350 - protein, 6 aa, synthetic construct
QQQGHD

SEQ ID NO: 5351 - protein, 6 aa, synthetic construct
TPQDHD

SEQ ID NO: 5352 - protein, 6 aa, synthetic construct
HDWGHD

SEQ ID NO: 5353 - protein, 6 aa, synthetic construct
IEGGHD

SEQ ID NO: 5354 - protein, 11 aa, synthetic construct
TINGHDSPHKR

SEQ ID NO: 5355 - protein, 11 aa, synthetic construct
MPEGHDSPHKS

SEQ ID NO: 5356 - protein, 11 aa, synthetic construct
MEGGHDSPHKS

SEQ ID NO: 5357 - protein, 11 aa, synthetic construct
MEYGHDSPHKS

SEQ ID NO: 5358 - protein, 11 aa, synthetic construct
AEWGHDSPHKS

SEQ ID NO: 5359 - protein, 11 aa, synthetic construct
CEWGHDSPHKS

SEQ ID NO: 5360 - protein, 11 aa, synthetic construct
ANNGQDSPHKS

SEQ ID NO: 5361 - protein, 11 aa, synthetic construct
IPEGHDSPHKS

SEQ ID NO: 5362 - protein, 11 aa, synthetic construct
ADMGHDSPHKS

SEQ ID NO: 5363 - protein, 11 aa, synthetic construct
IEYGHDSPHKS

SEQ ID NO: 5364 - protein, 11 aa, synthetic construct
ADYGHDSPHKS

SEQ ID NO: 5365 - protein, 11 aa, synthetic construct
IETGHDSPHKS

SEQ ID NO: 5366 - protein, 11 aa, synthetic construct
MEWGHDSPHKS

SEQ ID NO: 5367 - protein, 11 aa, synthetic construct
CEYGHDSPHKS

SEQ ID NO: 5368 - protein, 11 aa, synthetic construct
RINGHDSPHKS

SEQ ID NO: 5369 - protein, 11 aa, synthetic construct
MEIGHDSPHKS

SEQ ID NO: 5370 - protein, 11 aa, synthetic construct
LEYGHDSPHKS

SEQ ID NO: 5371 - protein, 11 aa, synthetic construct
ADWGHDSPHKS

SEQ ID NO: 5372 - protein, 11 aa, synthetic construct
IEIGHDSPHKS

SEQ ID NO: 5373 - protein, 11 aa, synthetic construct
TIKDNDSPHKS

SEQ ID NO: 5374 - protein, 11 aa, synthetic construct
DIMGHDSPHKS

SEQ ID NO: 5375 - protein, 11 aa, synthetic construct
FEQGHDSPHKS

SEQ ID NO: 5376 - protein, 11 aa, synthetic construct
MEFGHDSPHKS

SEQ ID NO: 5377 - protein, 11 aa, synthetic construct
CDQGHDSPHKS

SEQ ID NO: 5378 - protein, 11 aa, synthetic construct
LPEGHDSPHKS

SEQ ID NO: 5379 - protein, 11 aa, synthetic construct
IENGHDSPHKS

SEQ ID NO: 5380 - protein, 11 aa, synthetic construct
MESGHDSPHKS

SEQ ID NO: 5381 - protein, 11 aa, synthetic construct
AEIGHDSPHKS

SEQ ID NO: 5382 - protein, 11 aa, synthetic construct
VEYGHDSPHKS

SEQ ID NO: 5383 - protein, 11 aa, synthetic construct
TSNGDDSPHKS

SEQ ID NO: 5384 - protein, 11 aa, synthetic construct
IEVGHDSPHKS

SEQ ID NO: 5385 - protein, 11 aa, synthetic construct
MEMGHDSPHKS

SEQ ID NO: 5386 - protein, 11 aa, synthetic construct
AEVGHDSPHKS

SEQ ID NO: 5387 - protein, 11 aa, synthetic construct
MDAGHDSPHKS

SEQ ID NO: 5388 - protein, 11 aa, synthetic construct
VEWGHDSPHKS

SEQ ID NO: 5389 - protein, 11 aa, synthetic construct
AEQGHDSPHKS

SEQ ID NO: 5390 - protein, 11 aa, synthetic construct
LEWGHDSPHKS

SEQ ID NO: 5391 - protein, 11 aa, synthetic construct
MELGHDSPHKS

SEQ ID NO: 5392 - protein, 11 aa, synthetic construct
METGHDSPHKS

SEQ ID NO: 5393 - protein, 11 aa, synthetic construct
MEAGHDSPHKS

SEQ ID NO: 5394 - protein, 11 aa, synthetic construct
TINRQRSPHKS

SEQ ID NO: 5395 - protein, 11 aa, synthetic construct
IESGHDSPHKS

SEQ ID NO: 5396 - protein, 11 aa, synthetic construct
TAKDHDSPHKS

SEQ ID NO: 5397 - protein, 11 aa, synthetic construct
MEVGHDSPHKS

SEQ ID NO: 5398 - protein, 11 aa, synthetic construct
CEIGHDSPHKS

SEQ ID NO: 5399 - protein, 11 aa, synthetic construct
ATNGHDSPHKS

SEQ ID NO: 5400 - protein, 11 aa, synthetic construct
MDGGHDSPHKS

SEQ ID NO: 5401 - protein, 11 aa, synthetic construct
QEVGHDSPHKS

SEQ ID NO: 5402 - protein, 11 aa, synthetic construct
ADQGHDSPHKS

SEQ ID NO: 5403 - protein, 11 aa, synthetic construct
NMNGHDSPHKS

SEQ ID NO: 5404 - protein, 11 aa, synthetic construct
TPWEHDSPHKS

SEQ ID NO: 5405 - protein, 11 aa, synthetic construct
IEMGHDSPHKS

SEQ ID NO: 5406 - protein, 11 aa, synthetic construct
TANEHDSPHKS

SEQ ID NO: 5407 - protein, 11 aa, synthetic construct
TINGHDSPHKS

SEQ ID NO: 5408 - protein, 11 aa, synthetic construct
QQQGHDSPHKS

SEQ ID NO: 5409 - protein, 11 aa, synthetic construct
TPQDHDSPHKS

SEQ ID NO: 5410 - protein, 11 aa, synthetic construct
HDWGHDSPHKS

SEQ ID NO: 5411 - protein, 11 aa, synthetic construct
IEGGHDSPHKS

SEQ ID NO: 5412 - protein, 5 aa, synthetic construct
QNQQT

SEQ ID NO: 5413 - protein, 5 aa, synthetic construct
QNRHT

SEQ ID NO: 5414 - protein, 5 aa, synthetic construct
RDQQT

SEQ ID NO: 5415 - protein, 5 aa, synthetic construct
PNLQT

SEQ ID NO: 5416 - protein, 5 aa, synthetic construct
HVRQT

SEQ ID NO: 5417 - protein, 5 aa, synthetic construct
PNQHT

SEQ ID NO: 5418 - protein, 5 aa, synthetic construct
QSQQT

SEQ ID NO: 5419 - protein, 5 aa, synthetic construct
QNQQI

SEQ ID NO: 5420 - protein, 5 aa, synthetic construct
QPAKT

SEQ ID NO: 5421 - protein, 5 aa, synthetic construct
QTQQN

SEQ ID NO: 5422 - protein, 5 aa, synthetic construct
QNLAT

SEQ ID NO: 5423 - protein, 5 aa, synthetic construct
QNQLT

SEQ ID NO: 5424 - protein, 5 aa, synthetic construct
QGQQT

SEQ ID NO: 5425 - protein, 5 aa, synthetic construct
LNRQS

SEQ ID NO: 5426 - protein, 5 aa, synthetic construct
HNQQT

SEQ ID NO: 5427 - protein, 5 aa, synthetic construct
QNPPT

SEQ ID NO: 5428 - protein, 5 aa, synthetic construct
QNLQT

SEQ ID NO: 5429 - protein, 5 aa, synthetic construct
QYQQT

SEQ ID NO: 5430 - protein, 5 aa, synthetic construct
QDQET

SEQ ID NO: 5431 - protein, 5 aa, synthetic construct
QNHQT

SEQ ID NO: 5432 - protein, 5 aa, synthetic construct
QDQQT

SEQ ID NO: 5433 - protein, 5 aa, synthetic construct
HWQQT

SEQ ID NO: 5434 - protein, 5 aa, synthetic construct
PNQQT

SEQ ID NO: 5435 - protein, 5 aa, synthetic construct
QNQLI

SEQ ID NO: 5436 - protein, 5 aa, synthetic construct
PEQQT

SEQ ID NO: 5437 - protein, 5 aa, synthetic construct
QRTMT

SEQ ID NO: 5438 - protein, 5 aa, synthetic construct
QNQQH

SEQ ID NO: 5439 - protein, 5 aa, synthetic construct
LHQHT

SEQ ID NO: 5440 - protein, 5 aa, synthetic construct
QHRIT

SEQ ID NO: 5441 - protein, 5 aa, synthetic construct
QYIHT

SEQ ID NO: 5442 - protein, 5 aa, synthetic construct
QKFET

SEQ ID NO: 5443 - protein, 5 aa, synthetic construct
QFPST

SEQ ID NO: 5444 - protein, 5 aa, synthetic construct
HNQQR

SEQ ID NO: 5445 - protein, 5 aa, synthetic construct
QAIKT

SEQ ID NO: 5446 - protein, 5 aa, synthetic construct
QNRQT

SEQ ID NO: 5447 - protein, 5 aa, synthetic construct
QYQHT

SEQ ID NO: 5448 - protein, 5 aa, synthetic construct
QNPQS

SEQ ID NO: 5449 - protein, 5 aa, synthetic construct
QHQLT

SEQ ID NO: 5450 - protein, 5 aa, synthetic construct
QSPPT

SEQ ID NO: 5451 - protein, 5 aa, synthetic construct
QAKLT

SEQ ID NO: 5452 - protein, 5 aa, synthetic construct
KSQQT

SEQ ID NO: 5453 - protein, 5 aa, synthetic construct
QDRPT

SEQ ID NO: 5454 - protein, 5 aa, synthetic construct
QSQQL

SEQ ID NO: 5455 - protein, 5 aa, synthetic construct
QAFHT

SEQ ID NO: 5456 - protein, 5 aa, synthetic construct
QKQQD

SEQ ID NO: 5457 - protein, 5 aa, synthetic construct
QNAQT

SEQ ID NO: 5458 - protein, 5 aa, synthetic construct
HNQLT

SEQ ID NO: 5459 - protein, 5 aa, synthetic construct
QNQQY

SEQ ID NO: 5460 - protein, 5 aa, synthetic construct
QKLNT

SEQ ID NO: 5461 - protein, 5 aa, synthetic construct
QNVQT

SEQ ID NO: 5462 - protein, 5 aa, synthetic construct
QAQQT

SEQ ID NO: 5463 - protein, 5 aa, synthetic construct
QNLQA

SEQ ID NO: 5464 - protein, 5 aa, synthetic construct
QTPPT

SEQ ID NO: 5465 - protein, 5 aa, synthetic construct
QYQHA

SEQ ID NO: 5466 - protein, 5 aa, synthetic construct
QGQQA

SEQ ID NO: 5467 - protein, 5 aa, synthetic construct
QPPAT

SEQ ID NO: 5468 - protein, 5 aa, synthetic construct
QERPT

SEQ ID NO: 5469 - protein, 5 aa, synthetic construct
QDLQT

SEQ ID NO: 5470 - protein, 5 aa, synthetic construct
QAMHT

SEQ ID NO: 5471 - protein, 5 aa, synthetic construct
LNQQT

SEQ ID NO: 5472 - protein, 5 aa, synthetic construct
QHPST

SEQ ID NO: 5473 - protein, 5 aa, synthetic construct
PGLQT

SEQ ID NO: 5474 - protein, 5 aa, synthetic construct
QGIRT

SEQ ID NO: 5475 - protein, 5 aa, synthetic construct
QAPAT

SEQ ID NO: 5476 - protein, 5 aa, synthetic construct
QSQQI

SEQ ID NO: 5477 - protein, 5 aa, synthetic construct
QIPPT

SEQ ID NO: 5478 - protein, 5 aa, synthetic construct
QTQLT

SEQ ID NO: 5479 - protein, 5 aa, synthetic construct
QAPST

SEQ ID NO: 5480 - protein, 5 aa, synthetic construct
QNTYA

SEQ ID NO: 5481 - protein, 5 aa, synthetic construct
QNQHI

SEQ ID NO: 5482 - protein, 5 aa, synthetic construct
QNHLT

SEQ ID NO: 5483 - protein, 5 aa, synthetic construct
QIGMT

SEQ ID NO: 5484 - protein, 5 aa, synthetic construct
LNKQT

SEQ ID NO: 5485 - protein, 5 aa, synthetic construct
QLQQT

SEQ ID NO: 5486 - protein, 5 aa, synthetic construct
QRMST

SEQ ID NO: 5487 - protein, 5 aa, synthetic construct
QGILT

SEQ ID NO: 5488 - protein, 5 aa, synthetic construct
QDRQT

SEQ ID NO: 5489 - protein, 5 aa, synthetic construct
RDWQT

SEQ ID NO: 5490 - protein, 5 aa, synthetic construct
QNTHD

SEQ ID NO: 5491 - protein, 5 aa, synthetic construct
PNLQI

SEQ ID NO: 5492 - protein, 5 aa, synthetic construct
QERST

SEQ ID NO: 5493 - protein, 5 aa, synthetic construct
QNYQT

SEQ ID NO: 5494 - protein, 5 aa, synthetic construct
QRTCT

SEQ ID NO: 5495 - protein, 5 aa, synthetic construct
QIGHT

SEQ ID NO: 5496 - protein, 5 aa, synthetic construct
QGAIT

SEQ ID NO: 5497 - protein, 5 aa, synthetic construct
QVPPT

SEQ ID NO: 5498 - protein, 5 aa, synthetic construct
QVQQI

SEQ ID NO: 5499 - protein, 5 aa, synthetic construct
LMRQT

SEQ ID NO: 5500 - protein, 5 aa, synthetic construct
QYSVT

SEQ ID NO: 5501 - protein, 5 aa, synthetic construct
QAITT

SEQ ID NO: 5502 - protein, 5 aa, synthetic construct
QKTLT

SEQ ID NO: 5503 - protein, 5 aa, synthetic construct
QNQWT

SEQ ID NO: 5504 - protein, 5 aa, synthetic construct
QLHHT

SEQ ID NO: 5505 - protein, 5 aa, synthetic construct
QNIII

SEQ ID NO: 5506 - protein, 5 aa, synthetic construct
QGHHT

SEQ ID NO: 5507 - protein, 5 aa, synthetic construct
QSKVT

SEQ ID NO: 5508 - protein, 5 aa, synthetic construct
QLPST

SEQ ID NO: 5509 - protein, 5 aa, synthetic construct
IGKQT

SEQ ID NO: 5510 - protein, 5 aa, synthetic construct
QAIHT

SEQ ID NO: 5511 - protein, 5 aa, synthetic construct
QHGLT

SEQ ID NO: 5512 - protein, 5 aa, synthetic construct
QFMCT

SEQ ID NO: 5513 - protein, 5 aa, synthetic construct
QHLQT

SEQ ID NO: 5514 - protein, 5 aa, synthetic construct
QNHQN

SEQ ID NO: 5515 - protein, 5 aa, synthetic construct
QPART

SEQ ID NO: 5516 - protein, 5 aa, synthetic construct
QSLQT

SEQ ID NO: 5517 - protein, 5 aa, synthetic construct
QSQLT

SEQ ID NO: 5518 - protein, 5 aa, synthetic construct
QDRQS

SEQ ID NO: 5519 - protein, 5 aa, synthetic construct
QMPST

SEQ ID NO: 5520 - protein, 5 aa, synthetic construct
QGSLT

SEQ ID NO: 5521 - protein, 5 aa, synthetic construct
QVPAT

SEQ ID NO: 5522 - protein, 5 aa, synthetic construct
QDKQT

SEQ ID NO: 5523 - protein, 5 aa, synthetic construct
HYQQT

SEQ ID NO: 5524 - protein, 5 aa, synthetic construct
QVPST

SEQ ID NO: 5525 - protein, 5 aa, synthetic construct
RGEQT

SEQ ID NO: 5526 - protein, 5 aa, synthetic construct
PGQQT

SEQ ID NO: 5527 - protein, 5 aa, synthetic construct
QSLQI

SEQ ID NO: 5528 - protein, 5 aa, synthetic construct
LEQQT

SEQ ID NO: 5529 - protein, 5 aa, synthetic construct
QNQST

SEQ ID NO: 5530 - protein, 5 aa, synthetic construct
QKVIT

SEQ ID NO: 5531 - protein, 5 aa, synthetic construct
QNNDQ

SEQ ID NO: 5532 - protein, 5 aa, synthetic construct
QSVHT

SEQ ID NO: 5533 - protein, 5 aa, synthetic construct
QPLGT

SEQ ID NO: 5534 - protein, 5 aa, synthetic construct
HNQET

SEQ ID NO: 5535 - protein, 5 aa, synthetic construct
QNLQI

SEQ ID NO: 5536 - protein, 5 aa, synthetic construct
QIQQT

SEQ ID NO: 5537 - protein, 5 aa, synthetic construct
QVRNT

SEQ ID NO: 5538 - protein, 5 aa, synthetic construct
PSNQT

SEQ ID NO: 5539 - protein, 5 aa, synthetic construct
QVGHT

SEQ ID NO: 5540 - protein, 5 aa, synthetic construct
QRDIT

SEQ ID NO: 5541 - protein, 5 aa, synthetic construct
QMPNT

SEQ ID NO: 5542 - protein, 5 aa, synthetic construct
RGLQT

SEQ ID NO: 5543 - protein, 5 aa, synthetic construct
QKQQT

SEQ ID NO: 5544 - protein, 5 aa, synthetic construct
PSLQT

SEQ ID NO: 5545 - protein, 5 aa, synthetic construct
QRDQT

SEQ ID NO: 5546 - protein, 5 aa, synthetic construct
QAKGT

SEQ ID NO: 5547 - protein, 5 aa, synthetic construct
QSAHT

SEQ ID NO: 5548 - protein, 5 aa, synthetic construct
QSTMT

SEQ ID NO: 5549 - protein, 5 aa, synthetic construct
QREMT

SEQ ID NO: 5550 - protein, 5 aa, synthetic construct
QYRAT

SEQ ID NO: 5551 - protein, 5 aa, synthetic construct
QWQQT

SEQ ID NO: 5552 - protein, 5 aa, synthetic construct
QRMNT

SEQ ID NO: 5553 - protein, 5 aa, synthetic construct
GDSQT

SEQ ID NO: 5554 - protein, 5 aa, synthetic construct
QKIST

SEQ ID NO: 5555 - protein, 5 aa, synthetic construct
PSMQT

SEQ ID NO: 5556 - protein, 5 aa, synthetic construct
SPRQT

SEQ ID NO: 5557 - protein, 5 aa, synthetic construct
MEQQT

SEQ ID NO: 5558 - protein, 5 aa, synthetic construct
QYQNT

SEQ ID NO: 5559 - protein, 5 aa, synthetic construct
QHQQT

SEQ ID NO: 5560 - protein, 5 aa, synthetic construct
INQQT

SEQ ID NO: 5561 - protein, 5 aa, synthetic construct
PNQQH

SEQ ID NO: 5562 - protein, 5 aa, synthetic construct
ENRQT

SEQ ID NO: 5563 - protein, 5 aa, synthetic construct
QTQQA

SEQ ID NO: 5564 - protein, 5 aa, synthetic construct
QNQAT

SEQ ID NO: 5565 - protein, 4 aa, synthetic construct
KTII

SEQ ID NO: 5566 - protein, 4 aa, synthetic construct
KTFP

SEQ ID NO: 5567 - protein, 4 aa, synthetic construct
KTEK

SEQ ID NO: 5568 - protein, 4 aa, synthetic construct
KTVN

SEQ ID NO: 5569 - protein, 4 aa, synthetic construct
KTFN

SEQ ID NO: 5570 - protein, 4 aa, synthetic construct
KTIN

SEQ ID NO: 5571 - protein, 4 aa, synthetic construct
TTIN

SEQ ID NO: 5572 - protein, 4 aa, synthetic construct
KSIN

SEQ ID NO: 5573 - protein, 4 aa, synthetic construct
KTER

SEQ ID NO: 5574 - protein, 4 aa, synthetic construct
KELH

SEQ ID NO: 5575 - protein, 4 aa, synthetic construct
KAIN

SEQ ID NO: 5576 - protein, 4 aa, synthetic construct
KTDN

SEQ ID NO: 5577 - protein, 4 aa, synthetic construct
KTFH

SEQ ID NO: 5578 - protein, 4 aa, synthetic construct
KTSN

SEQ ID NO: 5579 - protein, 4 aa, synthetic construct
ETIN

SEQ ID NO: 5580 - protein, 4 aa, synthetic construct
NTIN

SEQ ID NO: 5581 - protein, 4 aa, synthetic construct
KTEN

SEQ ID NO: 5582 - protein, 4 aa, synthetic construct
KTSS

SEQ ID NO: 5583 - protein, 4 aa, synthetic construct
KTCN

SEQ ID NO: 5584 - protein, 4 aa, synthetic construct
KTEH

SEQ ID NO: 5585 - protein, 4 aa, synthetic construct
KAEM

SEQ ID NO: 5586 - protein, 4 aa, synthetic construct
KATN

SEQ ID NO: 5587 - protein, 4 aa, synthetic construct
KAIK

SEQ ID NO: 5588 - protein, 4 aa, synthetic construct
KTDK

SEQ ID NO: 5589 - protein, 4 aa, synthetic construct
KTFK

SEQ ID NO: 5590 - protein, 4 aa, synthetic construct
KSDQ

SEQ ID NO: 5591 - protein, 4 aa, synthetic construct
KTEI

SEQ ID NO: 5592 - protein, 4 aa, synthetic construct
KTID

SEQ ID NO: 5593 - protein, 4 aa, synthetic construct
KNTN

SEQ ID NO: 5594 - protein, 4 aa, synthetic construct
KTET

SEQ ID NO: 5595 - protein, 4 aa, synthetic construct
KTEL

SEQ ID NO: 5596 - protein, 4 aa, synthetic construct
KNIN

SEQ ID NO: 5597 - protein, 4 aa, synthetic construct
KTEA

SEQ ID NO: 5598 - protein, 4 aa, synthetic construct
KTAN

SEQ ID NO: 5599 - protein, 4 aa, synthetic construct
NTIY

SEQ ID NO: 5600 - protein, 4 aa, synthetic construct
KTFS

SEQ ID NO: 5601 - protein, 4 aa, synthetic construct
KTES

SEQ ID NO: 5602 - protein, 4 aa, synthetic construct
KTTN

SEQ ID NO: 5603 - protein, 4 aa, synthetic construct
KTED

SEQ ID NO: 5604 - protein, 4 aa, synthetic construct
KTNN

SEQ ID NO: 5605 - protein, 4 aa, synthetic construct
KEVH

SEQ ID NO: 5606 - protein, 4 aa, synthetic construct
KTIS

SEQ ID NO: 5607 - protein, 4 aa, synthetic construct
KTVR

SEQ ID NO: 5608 - protein, 4 aa, synthetic construct
KTDR

SEQ ID NO: 5609 - protein, 4 aa, synthetic construct
ETIK

SEQ ID NO: 5610 - protein, 4 aa, synthetic construct
KNHI

SEQ ID NO: 5611 - protein, 4 aa, synthetic construct
KESD

SEQ ID NO: 5612 - protein, 4 aa, synthetic construct
KTIK

SEQ ID NO: 5613 - protein, 4 aa, synthetic construct
KTDL

SEQ ID NO: 5614 - protein, 4 aa, synthetic construct
KTVP

SEQ ID NO: 5615 - protein, 4 aa, synthetic construct
KTVI

SEQ ID NO: 5616 - protein, 4 aa, synthetic construct
KAEH

SEQ ID NO: 5617 - protein, 4 aa, synthetic construct
KNCL

SEQ ID NO: 5618 - protein, 4 aa, synthetic construct
KTVK

SEQ ID NO: 5619 - protein, 4 aa, synthetic construct
KNAD

SEQ ID NO: 5620 - protein, 4 aa, synthetic construct
KTIT

SEQ ID NO: 5621 - protein, 4 aa, synthetic construct
KNCV

SEQ ID NO: 5622 - protein, 4 aa, synthetic construct
KNAL

SEQ ID NO: 5623 - protein, 4 aa, synthetic construct
KVIN

SEQ ID NO: 5624 - protein, 4 aa, synthetic construct
KTEF

SEQ ID NO: 5625 - protein, 4 aa, synthetic construct
KTRE

SEQ ID NO: 5626 - protein, 4 aa, synthetic construct
KQGE

SEQ ID NO: 5627 - protein, 4 aa, synthetic construct
KSEK

SEQ ID NO: 5628 - protein, 4 aa, synthetic construct
KNVN

SEQ ID NO: 5629 - protein, 4 aa, synthetic construct
KGGE

SEQ ID NO: 5630 - protein, 4 aa, synthetic construct
KEFV

SEQ ID NO: 5631 - protein, 4 aa, synthetic construct
KSDK

SEQ ID NO: 5632 - protein, 4 aa, synthetic construct
KTEQ

SEQ ID NO: 5633 - protein, 4 aa, synthetic construct
KEVQ

SEQ ID NO: 5634 - protein, 4 aa, synthetic construct
KTEY

SEQ ID NO: 5635 - protein, 4 aa, synthetic construct
KNCW

SEQ ID NO: 5636 - protein, 4 aa, synthetic construct
KTDV

SEQ ID NO: 5637 - protein, 4 aa, synthetic construct
KSDI

SEQ ID NO: 5638 - protein, 4 aa, synthetic construct
KNSI

SEQ ID NO: 5639 - protein, 4 aa, synthetic construct
KNSL

SEQ ID NO: 5640 - protein, 4 aa, synthetic construct
KEVV

SEQ ID NO: 5641 - protein, 4 aa, synthetic construct
KTEP

SEQ ID NO: 5642 - protein, 4 aa, synthetic construct
KSEL

SEQ ID NO: 5643 - protein, 4 aa, synthetic construct
KTWQ

SEQ ID NO: 5644 - protein, 4 aa, synthetic construct
KTEV

SEQ ID NO: 5645 - protein, 4 aa, synthetic construct
KAVN

SEQ ID NO: 5646 - protein, 4 aa, synthetic construct
KGVL

SEQ ID NO: 5647 - protein, 4 aa, synthetic construct
KTEG

SEQ ID NO: 5648 - protein, 4 aa, synthetic construct
KTRD

SEQ ID NO: 5649 - protein, 4 aa, synthetic construct
KTGN

SEQ ID NO: 5650 - protein, 4 aa, synthetic construct
KNAI

SEQ ID NO: 5651 - protein, 4 aa, synthetic construct
KAEN

SEQ ID NO: 5652 - protein, 4 aa, synthetic construct
KAET

SEQ ID NO: 5653 - protein, 4 aa, synthetic construct
KTVH

SEQ ID NO: 5654 - protein, 4 aa, synthetic construct
KETA

SEQ ID NO: 5655 - protein, 4 aa, synthetic construct
KNNL

SEQ ID NO: 5656 - protein, 4 aa, synthetic construct
EAIN

SEQ ID NO: 5657 - protein, 4 aa, synthetic construct
KSLN

SEQ ID NO: 5658 - protein, 4 aa, synthetic construct
KTIP

SEQ ID NO: 5659 - protein, 4 aa, synthetic construct
KTIH

SEQ ID NO: 5660 - protein, 18 aa, synthetic construct
KTINGSGSPHSKAQNQQT

SEQ ID NO: 5661 - protein, 5 aa, synthetic construct
NPHKS

SEQ ID NO: 5662 - protein, 6 aa, synthetic construct
NPHKSG

SEQ ID NO: 5663 - protein, 6 aa, synthetic construct
SPHKIV

SEQ ID NO: 5664 - protein, 6 aa, synthetic construct
GHDNPH

SEQ ID NO: 5665 - protein, 6 aa, synthetic construct
AHDSPH

SEQ ID NO: 5666 - protein, 6 aa, synthetic construct
KHDSPH

SEQ ID NO: 5667 - protein, 6 aa, synthetic construct
WHDSPH

SEQ ID NO: 5668 - protein, 6 aa, synthetic construct
RHDSPH

SEQ ID NO: 5669 - protein, 6 aa, synthetic construct
LHDSPH

SEQ ID NO: 5670 - protein, 6 aa, synthetic construct
IHDSPH

SEQ ID NO: 5671 - protein, 6 aa, synthetic construct
MHDSPH

SEQ ID NO: 5672 - protein, 6 aa, synthetic construct
NHDSPH

SEQ ID NO: 5673 - protein, 6 aa, synthetic construct
THDSPH

SEQ ID NO: 5674 - protein, 6 aa, synthetic construct
EHDSPH

SEQ ID NO: 5675 - protein, 6 aa, synthetic construct
QHDSPH

SEQ ID NO: 5676 - protein, 6 aa, synthetic construct
YHDSPH

SEQ ID NO: 5677 - protein, 6 aa, synthetic construct
HHDSPH

SEQ ID NO: 5678 - protein, 6 aa, synthetic construct
FHDSPH

SEQ ID NO: 5679 - protein, 6 aa, synthetic construct
VHDSPH

SEQ ID NO: 5680 - protein, 9 aa, synthetic construct
GHDNPHKSG

SEQ ID NO: 5681 - protein, 9 aa, synthetic construct
AHDSPHKSG

SEQ ID NO: 5682 - protein, 9 aa, synthetic construct
AHDSPHKIG

SEQ ID NO: 5683 - protein, 9 aa, synthetic construct
KHDSPHKSG

SEQ ID NO: 5684 - protein, 9 aa, synthetic construct
WHDSPHKSG

SEQ ID NO: 5685 - protein, 9 aa, synthetic construct
RHDSPHKSG

SEQ ID NO: 5686 - protein, 9 aa, synthetic construct
LHDSPHKSG

SEQ ID NO: 5687 - protein, 9 aa, synthetic construct
IHDSPHKSG

SEQ ID NO: 5688 - protein, 9 aa, synthetic construct
MHDSPHKSG

SEQ ID NO: 5689 - protein, 9 aa, synthetic construct
NHDSPHKSG

SEQ ID NO: 5690 - protein, 9 aa, synthetic construct
THDSPHKSG

SEQ ID NO: 5691 - protein, 9 aa, synthetic construct
EHDSPHKSG

SEQ ID NO: 5692 - protein, 9 aa, synthetic construct
QHDSPHKSG

SEQ ID NO: 5693 - protein, 9 aa, synthetic construct
RHDSPHKIV

SEQ ID NO: 5694 - protein, 9 aa, synthetic construct
YHDSPHKSG

SEQ ID NO: 5695 - protein, 9 aa, synthetic construct
HHDSPHKSG

SEQ ID NO: 5696 - protein, 9 aa, synthetic construct
FHDSPHKSG

SEQ ID NO: 5697 - protein, 9 aa, synthetic construct
VHDSPHKSG

SEQ ID NO: 5698 - protein, 5 aa, synthetic construct
QIRQT

SEQ ID NO: 5699 - protein, 5 aa, synthetic construct
QNQHA

SEQ ID NO: 5700 - protein, 5 aa, synthetic construct
QSVQT

SEQ ID NO: 5701 - protein, 5 aa, synthetic construct
RSQQT

SEQ ID NO: 5702 - protein, 5 aa, synthetic construct
QNKLE

SEQ ID NO: 5703 - protein, 5 aa, synthetic construct
QNQQK

SEQ ID NO: 5704 - protein, 5 aa, synthetic construct
QHQQA

SEQ ID NO: 5705 - protein, 5 aa, synthetic construct
QIQHT

SEQ ID NO: 5706 - protein, 5 aa, synthetic construct
PRQQT

SEQ ID NO: 5707 - protein, 5 aa, synthetic construct
HTQQT

SEQ ID NO: 5708 - protein, 5 aa, synthetic construct
QRQHT

SEQ ID NO: 5709 - protein, 5 aa, synthetic construct
QNQQS

SEQ ID NO: 5710 - protein, 5 aa, synthetic construct
RNQET

SEQ ID NO: 5711 - protein, 5 aa, synthetic construct
KNQQT

SEQ ID NO: 5712 - protein, 5 aa, synthetic construct
QTQQT

SEQ ID NO: 5713 - protein, 5 aa, synthetic construct
QTQQI

SEQ ID NO: 5714 - protein, 5 aa, synthetic construct
QSKQA

SEQ ID NO: 5715 - protein, 5 aa, synthetic construct
QNQPP

SEQ ID NO: 5716 - protein, 5 aa, synthetic construct
QSPQT

SEQ ID NO: 5717 - protein, 5 aa, synthetic construct
QNQQG

SEQ ID NO: 5718 - protein, 5 aa, synthetic construct
QNQHT

SEQ ID NO: 5719 - protein, 5 aa, synthetic construct
QTRQT

SEQ ID NO: 5720 - protein, 5 aa, synthetic construct
QNLHT

SEQ ID NO: 5721 - protein, 5 aa, synthetic construct
QNQET

SEQ ID NO: 5722 - protein, 5 aa, synthetic construct
LNQPT

SEQ ID NO: 5723 - protein, 5 aa, synthetic construct
QNQDT

SEQ ID NO: 5724 - protein, 5 aa, synthetic construct
RNQQT

SEQ ID NO: 5725 - protein, 5 aa, synthetic construct
QNLLT

SEQ ID NO: 5726 - protein, 5 aa, synthetic construct
QLVIT

SEQ ID NO: 5727 - protein, 5 aa, synthetic construct
RTQET

SEQ ID NO: 5728 - protein, 5 aa, synthetic construct
QTHQT

SEQ ID NO: 5729 - protein, 5 aa, synthetic construct
QNQPA

SEQ ID NO: 5730 - protein, 5 aa, synthetic construct
QDQHT

SEQ ID NO: 5731 - protein, 5 aa, synthetic construct
QSQHT

SEQ ID NO: 5732 - protein, 5 aa, synthetic construct
RNQQI

SEQ ID NO: 5733 - protein, 5 aa, synthetic construct
VRQQT

SEQ ID NO: 5734 - protein, 5 aa, synthetic construct
QNQHS

SEQ ID NO: 5735 - protein, 5 aa, synthetic construct
AWQQT

SEQ ID NO: 5736 - protein, 5 aa, synthetic construct
QSVPT

SEQ ID NO: 5737 - protein, 5 aa, synthetic construct
QNIQP

SEQ ID NO: 5738 - protein, 5 aa, synthetic construct
QNHLN

SEQ ID NO: 5739 - protein, 5 aa, synthetic construct
LDQQT

SEQ ID NO: 5740 - protein, 5 aa, synthetic construct
PDQQS

SEQ ID NO: 5741 - protein, 5 aa, synthetic construct
ESQQT

SEQ ID NO: 5742 - protein, 5 aa, synthetic construct
QNKQT

SEQ ID NO: 5743 - protein, 5 aa, synthetic construct
QRQLT

SEQ ID NO: 5744 - protein, 5 aa, synthetic construct
QIIVT

SEQ ID NO: 5745 - protein, 5 aa, synthetic construct
QKQST

SEQ ID NO: 5746 - protein, 5 aa, synthetic construct
QSHQT

SEQ ID NO: 5747 - protein, 5 aa, synthetic construct
QFVVT

SEQ ID NO: 5748 - protein, 5 aa, synthetic construct
QSQPT

SEQ ID NO: 5749 - protein, 5 aa, synthetic construct
QNEQT

SEQ ID NO: 5750 - protein, 5 aa, synthetic construct
RNRQT

SEQ ID NO: 5751 - protein, 5 aa, synthetic construct
QSKQT

SEQ ID NO: 5752 - protein, 5 aa, synthetic construct
QNPLT

SEQ ID NO: 5753 - protein, 5 aa, synthetic construct
RDQKT

SEQ ID NO: 5754 - protein, 5 aa, synthetic construct
HNQQN

SEQ ID NO: 5755 - protein, 5 aa, synthetic construct
QWKRT

SEQ ID NO: 5756 - protein, 5 aa, synthetic construct
QNHQI

SEQ ID NO: 5757 - protein, 5 aa, synthetic construct
QNQQA

SEQ ID NO: 5758 - protein, 5 aa, synthetic construct
QNQLN

SEQ ID NO: 5759 - protein, 5 aa, synthetic construct
QTQPT

SEQ ID NO: 5760 - protein, 5 aa, synthetic construct
QKQLT

SEQ ID NO: 5761 - protein, 5 aa, synthetic construct
RNQLA

SEQ ID NO: 5762 - protein, 5 aa, synthetic construct
RNQQS

SEQ ID NO: 5763 - protein, 5 aa, synthetic construct
ISIQT

SEQ ID NO: 5764 - protein, 5 aa, synthetic construct
QNQQN

SEQ ID NO: 5765 - protein, 5 aa, synthetic construct
QSQQS

SEQ ID NO: 5766 - protein, 5 aa, synthetic construct
QTVCT

SEQ ID NO: 5767 - protein, 5 aa, synthetic construct
QYQQI

SEQ ID NO: 5768 - protein, 5 aa, synthetic construct
QQIMT

SEQ ID NO: 5769 - protein, 5 aa, synthetic construct
QNEQS

SEQ ID NO: 5770 - protein, 5 aa, synthetic construct
LNHQT

SEQ ID NO: 5771 - protein, 5 aa, synthetic construct
QMIHT

SEQ ID NO: 5772 - protein, 5 aa, synthetic construct
RNHQS

SEQ ID NO: 5773 - protein, 5 aa, synthetic construct
QKMNT

SEQ ID NO: 5774 - protein, 5 aa, synthetic construct
QSQQN

SEQ ID NO: 5775 - protein, 4 aa, synthetic construct
KSIY

SEQ ID NO: 5776 - protein, 4 aa, synthetic construct
KIIN

SEQ ID NO: 5777 - protein, 4 aa, synthetic construct
KAII

SEQ ID NO: 5778 - protein, 4 aa, synthetic construct
KAIS

SEQ ID NO: 5779 - protein, 4 aa, synthetic construct
KTVD

SEQ ID NO: 5780 - protein, 4 aa, synthetic construct
KTIE

SEQ ID NO: 5781 - protein, 4 aa, synthetic construct
KTIY

SEQ ID NO: 5782 - protein, 4 aa, synthetic construct
KNVV

SEQ ID NO: 5783 - protein, 4 aa, synthetic construct
KTDA

SEQ ID NO: 5784 - protein, 4 aa, synthetic construct
KTEM

SEQ ID NO: 5785 - protein, 4 aa, synthetic construct
KIVN

SEQ ID NO: 5786 - protein, 4 aa, synthetic construct
KIGN

SEQ ID NO: 5787 - protein, 4 aa, synthetic construct
KEVM

SEQ ID NO: 5788 - protein, 4 aa, synthetic construct
KYQV

SEQ ID NO: 5789 - protein, 4 aa, synthetic construct
KTVE

SEQ ID NO: 5790 - protein, 4 aa, synthetic construct
KAID

SEQ ID NO: 5791 - protein, 4 aa, synthetic construct
KTIM

SEQ ID NO: 5792 - protein, 4 aa, synthetic construct
KEVG

SEQ ID NO: 5793 - protein, 4 aa, synthetic construct
KSEM

SEQ ID NO: 5794 - protein, 4 aa, synthetic construct
KAQQ

SEQ ID NO: 5795 - protein, 4 aa, synthetic construct
KCGE

SEQ ID NO: 5796 - protein, 4 aa, synthetic construct
KASN

SEQ ID NO: 5797 - protein, 4 aa, synthetic construct
KTIG

SEQ ID NO: 5798 - protein, 4 aa, synthetic construct
KTDP

SEQ ID NO: 5799 - protein, 4 aa, synthetic construct
KELV

SEQ ID NO: 5800 - protein, 4 aa, synthetic construct
KELM

SEQ ID NO: 5801 - protein, 4 aa, synthetic construct
KNEI

SEQ ID NO: 5802 - protein, 4 aa, synthetic construct
KTPN

SEQ ID NO: 5803 - protein, 4 aa, synthetic construct
KITN

SEQ ID NO: 5804 - protein, 4 aa, synthetic construct
KTDI

SEQ ID NO: 5805 - protein, 4 aa, synthetic construct
KTDQ

SEQ ID NO: 5806 - protein, 4 aa, synthetic construct
KGIN

SEQ ID NO: 5807 - protein, 4 aa, synthetic construct
KSEI

SEQ ID NO: 5808 - protein, 4 aa, synthetic construct
KWSA

SEQ ID NO: 5809 - protein, 4 aa, synthetic construct
KELA

SEQ ID NO: 5810 - protein, 4 aa, synthetic construct
KQTQ

SEQ ID NO: 5811 - protein, 4 aa, synthetic construct
KGAD

SEQ ID NO: 5812 - protein, 4 aa, synthetic construct
KVGE

SEQ ID NO: 5813 - protein, 4 aa, synthetic construct
KANE

SEQ ID NO: 5814 - protein, 4 aa, synthetic construct
KTDT

SEQ ID NO: 5815 - protein, 4 aa, synthetic construct
KTCI

SEQ ID NO: 5816 - protein, 4 aa, synthetic construct
KELR

SEQ ID NO: 5817 - protein, 4 aa, synthetic construct
KCQI

SEQ ID NO: 5818 - protein, 4 aa, synthetic construct
KGVM

SEQ ID NO: 5819 - protein, 4 aa, synthetic construct
KACD

SEQ ID NO: 5820 - protein, 4 aa, synthetic construct
KNEL

SEQ ID NO: 5821 - protein, 4 aa, synthetic construct
KAAE

SEQ ID NO: 5822 - protein, 4 aa, synthetic construct
KGQN

SEQ ID NO: 5823 - protein, 4 aa, synthetic construct
KNEF

SEQ ID NO: 5824 - protein, 4 aa, synthetic construct
KTSI

SEQ ID NO: 5825 - protein, 4 aa, synthetic construct
KCDQ

SEQ ID NO: 5826 - protein, 4 aa, synthetic construct
KEIL

SEQ ID NO: 5827 - protein, 4 aa, synthetic construct
KTPD

SEQ ID NO: 5828 - protein, 18 aa, synthetic construct
KTINGHDSPHKSGQNQQT

SEQ ID NO: 5829 - protein, 4 aa, synthetic construct
SKAQ

SEQ ID NO: 5830 - protein, 4 aa, synthetic construct
SMYM

SEQ ID NO: 5831 - protein, 4 aa, synthetic construct
SKAF

SEQ ID NO: 5832 - protein, 4 aa, synthetic construct
SKLK

SEQ ID NO: 5833 - protein, 4 aa, synthetic construct
SKRH

SEQ ID NO: 5834 - protein, 4 aa, synthetic construct
SKWR

SEQ ID NO: 5835 - protein, 4 aa, synthetic construct
SRCR

SEQ ID NO: 5836 - protein, 4 aa, synthetic construct
SFTC

SEQ ID NO: 5837 - protein, 4 aa, synthetic construct
SKFF

SEQ ID NO: 5838 - protein, 4 aa, synthetic construct
IVWQ

SEQ ID NO: 5839 - protein, 4 aa, synthetic construct
SKYF

SEQ ID NO: 5840 - protein, 4 aa, synthetic construct
SKAR

SEQ ID NO: 5841 - protein, 4 aa, synthetic construct
SCHQ

SEQ ID NO: 5842 - protein, 4 aa, synthetic construct
FPWQ

SEQ ID NO: 5843 - protein, 4 aa, synthetic construct
SKIR

SEQ ID NO: 5844 - protein, 4 aa, synthetic construct
VYYQ

SEQ ID NO: 5845 - protein, 4 aa, synthetic construct
SLYW

SEQ ID NO: 5846 - protein, 4 aa, synthetic construct
SKPK

SEQ ID NO: 5847 - protein, 4 aa, synthetic construct
SRFW

SEQ ID NO: 5848 - protein, 4 aa, synthetic construct
SRMR

SEQ ID NO: 5849 - protein, 4 aa, synthetic construct
SVKK

SEQ ID NO: 5850 - protein, 4 aa, synthetic construct
SWAP

SEQ ID NO: 5851 - protein, 4 aa, synthetic construct
SLWK

SEQ ID NO: 5852 - protein, 4 aa, synthetic construct
SFRP

SEQ ID NO: 5853 - protein, 4 aa, synthetic construct
SKKV

SEQ ID NO: 5854 - protein, 4 aa, synthetic construct
SYAF

SEQ ID NO: 5855 - protein, 4 aa, synthetic construct
SKAC

SEQ ID NO: 5856 - protein, 4 aa, synthetic construct
SKRL

SEQ ID NO: 5857 - protein, 4 aa, synthetic construct
SCSR

SEQ ID NO: 5858 - protein, 4 aa, synthetic construct
SRCP

SEQ ID NO: 5859 - protein, 4 aa, synthetic construct
SGAC

SEQ ID NO: 5860 - protein, 4 aa, synthetic construct
SKFR

SEQ ID NO: 5861 - protein, 4 aa, synthetic construct
SFPF

SEQ ID NO: 5862 - protein, 4 aa, synthetic construct
SFFG

SEQ ID NO: 5863 - protein, 4 aa, synthetic construct
SMCQ

SEQ ID NO: 5864 - protein, 4 aa, synthetic construct
SKLF

SEQ ID NO: 5865 - protein, 4 aa, synthetic construct
SKTR

SEQ ID NO: 5866 - protein, 4 aa, synthetic construct
SGKR

SEQ ID NO: 5867 - protein, 4 aa, synthetic construct
FYRQ

SEQ ID NO: 5868 - protein, 4 aa, synthetic construct
CRVQ

SEQ ID NO: 5869 - protein, 4 aa, synthetic construct
YGIQ

SEQ ID NO: 5870 - protein, 4 aa, synthetic construct
VNCQ

SEQ ID NO: 5871 - protein, 4 aa, synthetic construct
SKPF

SEQ ID NO: 5872 - protein, 4 aa, synthetic construct
SLAW

SEQ ID NO: 5873 - protein, 4 aa, synthetic construct
SKRS

SEQ ID NO: 5874 - protein, 4 aa, synthetic construct
WSYQ

SEQ ID NO: 5875 - protein, 4 aa, synthetic construct
RWLQ

SEQ ID NO: 5876 - protein, 4 aa, synthetic construct
PSCQ

SEQ ID NO: 5877 - protein, 4 aa, synthetic construct
SSWL

SEQ ID NO: 5878 - protein, 4 aa, synthetic construct
SKRR

SEQ ID NO: 5879 - protein, 4 aa, synthetic construct
SKGC

SEQ ID NO: 5880 - protein, 4 aa, synthetic construct
VPWQ

SEQ ID NO: 5881 - protein, 4 aa, synthetic construct
SKRY

SEQ ID NO: 5882 - protein, 4 aa, synthetic construct
SGCQ

SEQ ID NO: 5883 - protein, 4 aa, synthetic construct
SFTP

SEQ ID NO: 5884 - protein, 4 aa, synthetic construct
STTC

SEQ ID NO: 5885 - protein, 4 aa, synthetic construct
PKRQ

SEQ ID NO: 5886 - protein, 4 aa, synthetic construct
SKCF

SEQ ID NO: 5887 - protein, 4 aa, synthetic construct
WVPQ

SEQ ID NO: 5888 - protein, 4 aa, synthetic construct
SFWS

SEQ ID NO: 5889 - protein, 4 aa, synthetic construct
SKFK

SEQ ID NO: 5890 - protein, 4 aa, synthetic construct
RIKQ

SEQ ID NO: 5891 - protein, 4 aa, synthetic construct
SKAP

SEQ ID NO: 5892 - protein, 4 aa, synthetic construct
SFRY

SEQ ID NO: 5893 - protein, 4 aa, synthetic construct
SKMI

SEQ ID NO: 5894 - protein, 4 aa, synthetic construct
LRWQ

SEQ ID NO: 5895 - protein, 4 aa, synthetic construct
LPTQ

SEQ ID NO: 5896 - protein, 4 aa, synthetic construct
SKWK

SEQ ID NO: 5897 - protein, 4 aa, synthetic construct
SYMR

SEQ ID NO: 5898 - protein, 4 aa, synthetic construct
SKAA

SEQ ID NO: 5899 - protein, 4 aa, synthetic construct
LLCQ

SEQ ID NO: 5900 - protein, 4 aa, synthetic construct
RCCQ

SEQ ID NO: 5901 - protein, 4 aa, synthetic construct
LCVQ

SEQ ID NO: 5902 - protein, 4 aa, synthetic construct
SKLT

SEQ ID NO: 5903 - protein, 4 aa, synthetic construct
SKLC

SEQ ID NO: 5904 - protein, 4 aa, synthetic construct
SYLV

SEQ ID NO: 5905 - protein, 4 aa, synthetic construct
QGCQ

SEQ ID NO: 5906 - protein, 4 aa, synthetic construct
MAFQ

SEQ ID NO: 5907 - protein, 4 aa, synthetic construct
SKWG

SEQ ID NO: 5908 - protein, 4 aa, synthetic construct
SKIL

SEQ ID NO: 5909 - protein, 4 aa, synthetic construct
SFQI

SEQ ID NO: 5910 - protein, 4 aa, synthetic construct
SKAL

SEQ ID NO: 5911 - protein, 4 aa, synthetic construct
SKAH

SEQ ID NO: 5912 - protein, 4 aa, synthetic construct
SLCL

SEQ ID NO: 5913 - protein, 4 aa, synthetic construct
RPWQ

SEQ ID NO: 5914 - protein, 4 aa, synthetic construct
RPRQ

SEQ ID NO: 5915 - protein, 4 aa, synthetic construct
SCPQ

SEQ ID NO: 5916 - protein, 4 aa, synthetic construct
SVRY

SEQ ID NO: 5917 - protein, 4 aa, synthetic construct
SVRC

SEQ ID NO: 5918 - protein, 4 aa, synthetic construct
SKMP

SEQ ID NO: 5919 - protein, 4 aa, synthetic construct
SKKT

SEQ ID NO: 5920 - protein, 4 aa, synthetic construct
SLPY

SEQ ID NO: 5921 - protein, 4 aa, synthetic construct
VYHQ

SEQ ID NO: 5922 - protein, 4 aa, synthetic construct
SYTR

SEQ ID NO: 5923 - protein, 4 aa, synthetic construct
LVYQ

SEQ ID NO: 5924 - protein, 4 aa, synthetic construct
YRYQ

SEQ ID NO: 5925 - protein, 4 aa, synthetic construct
SWLK

SEQ ID NO: 5926 - protein, 4 aa, synthetic construct
CPAQ

SEQ ID NO: 5927 - protein, 4 aa, synthetic construct
SMCT

SEQ ID NO: 5928 - protein, 4 aa, synthetic construct
SPPD

SEQ ID NO: 5929 - protein, 4 aa, synthetic construct
SKRN

SEQ ID NO: 5930 - protein, 4 aa, synthetic construct
RWTQ

SEQ ID NO: 5931 - protein, 4 aa, synthetic construct
PRKQ

SEQ ID NO: 5932 - protein, 4 aa, synthetic construct
SKCS

SEQ ID NO: 5933 - protein, 4 aa, synthetic construct
PFVQ

SEQ ID NO: 5934 - protein, 4 aa, synthetic construct
SKLP

SEQ ID NO: 5935 - protein, 4 aa, synthetic construct
SKSE

SEQ ID NO: 5936 - protein, 4 aa, synthetic construct
WVAQ

SEQ ID NO: 5937 - protein, 4 aa, synthetic construct
SLYQ

SEQ ID NO: 5938 - protein, 4 aa, synthetic construct
SKVR

SEQ ID NO: 5939 - protein, 4 aa, synthetic construct
CALQ

SEQ ID NO: 5940 - protein, 4 aa, synthetic construct
SSCT

SEQ ID NO: 5941 - protein, 4 aa, synthetic construct
SKNS

SEQ ID NO: 5942 - protein, 4 aa, synthetic construct
SKRK

SEQ ID NO: 5943 - protein, 4 aa, synthetic construct
LCTQ

SEQ ID NO: 5944 - protein, 4 aa, synthetic construct
STCL

SEQ ID NO: 5945 - protein, 4 aa, synthetic construct
SYAR

SEQ ID NO: 5946 - protein, 4 aa, synthetic construct
SKQR

SEQ ID NO: 5947 - protein, 4 aa, synthetic construct
SKRV

SEQ ID NO: 5948 - protein, 4 aa, synthetic construct
KSGQ

SEQ ID NO: 5949 - protein, 4 aa, synthetic construct
SYYS

SEQ ID NO: 5950 - protein, 4 aa, synthetic construct
SLTC

SEQ ID NO: 5951 - protein, 4 aa, synthetic construct
SCQS

SEQ ID NO: 5952 - protein, 4 aa, synthetic construct
SKAK

SEQ ID NO: 5953 - protein, 4 aa, synthetic construct
SKPQ

SEQ ID NO: 5954 - protein, 4 aa, synthetic construct
FPFQ

SEQ ID NO: 5955 - protein, 4 aa, synthetic construct
SKCT

SEQ ID NO: 5956 - protein, 4 aa, synthetic construct
SVFE

SEQ ID NO: 5957 - protein, 4 aa, synthetic construct
GRYQ

SEQ ID NO: 5958 - protein, 4 aa, synthetic construct
KAQA

SEQ ID NO: 5959 - protein, 4 aa, synthetic construct
KAQN

SEQ ID NO: 5960 - protein, 4 aa, synthetic construct
MYMN

SEQ ID NO: 5961 - protein, 4 aa, synthetic construct
KAFY

SEQ ID NO: 5962 - protein, 4 aa, synthetic construct
KLKR

SEQ ID NO: 5963 - protein, 4 aa, synthetic construct
KRHR

SEQ ID NO: 5964 - protein, 4 aa, synthetic construct
KAQK

SEQ ID NO: 5965 - protein, 4 aa, synthetic construct
KWRL

SEQ ID NO: 5966 - protein, 4 aa, synthetic construct
RCRN

SEQ ID NO: 5967 - protein, 4 aa, synthetic construct
FTCN

SEQ ID NO: 5968 - protein, 4 aa, synthetic construct
KFFI

SEQ ID NO: 5969 - protein, 4 aa, synthetic construct
KAQY

SEQ ID NO: 5970 - protein, 4 aa, synthetic construct
VWQN

SEQ ID NO: 5971 - protein, 4 aa, synthetic construct
KYFM

SEQ ID NO: 5972 - protein, 4 aa, synthetic construct
KARQ

SEQ ID NO: 5973 - protein, 4 aa, synthetic construct
CHQN

SEQ ID NO: 5974 - protein, 4 aa, synthetic construct
PWQN

SEQ ID NO: 5975 - protein, 4 aa, synthetic construct
KIRR

SEQ ID NO: 5976 - protein, 4 aa, synthetic construct
YYQN

SEQ ID NO: 5977 - protein, 4 aa, synthetic construct
LYWN

SEQ ID NO: 5978 - protein, 4 aa, synthetic construct
KPKR

SEQ ID NO: 5979 - protein, 4 aa, synthetic construct
KAFS

SEQ ID NO: 5980 - protein, 4 aa, synthetic construct
RFWN

SEQ ID NO: 5981 - protein, 4 aa, synthetic construct
KAQC

SEQ ID NO: 5982 - protein, 4 aa, synthetic construct
RMRN

SEQ ID NO: 5983 - protein, 4 aa, synthetic construct
VKKN

SEQ ID NO: 5984 - protein, 4 aa, synthetic construct
WAPN

SEQ ID NO: 5985 - protein, 4 aa, synthetic construct
LWKN

SEQ ID NO: 5986 - protein, 4 aa, synthetic construct
KARW

SEQ ID NO: 5987 - protein, 4 aa, synthetic construct
FRPN

SEQ ID NO: 5988 - protein, 4 aa, synthetic construct
KKVF

SEQ ID NO: 5989 - protein, 4 aa, synthetic construct
YAFN

SEQ ID NO: 5990 - protein, 4 aa, synthetic construct
KACS

SEQ ID NO: 5991 - protein, 4 aa, synthetic construct
KRLW

SEQ ID NO: 5992 - protein, 4 aa, synthetic construct
CSRN

SEQ ID NO: 5993 - protein, 4 aa, synthetic construct
RCPN

SEQ ID NO: 5994 - protein, 4 aa, synthetic construct
GACN

SEQ ID NO: 5995 - protein, 4 aa, synthetic construct
KFRQ

SEQ ID NO: 5996 - protein, 4 aa, synthetic construct
FPFN

SEQ ID NO: 5997 - protein, 4 aa, synthetic construct
FFGN

SEQ ID NO: 5998 - protein, 4 aa, synthetic construct
MCQN

SEQ ID NO: 5999 - protein, 4 aa, synthetic construct
KLFW

SEQ ID NO: 6000 - protein, 4 aa, synthetic construct
KTRK

SEQ ID NO: 6001 - protein, 4 aa, synthetic construct
GKRN

SEQ ID NO: 6002 - protein, 4 aa, synthetic construct
YRQN

SEQ ID NO: 6003 - protein, 4 aa, synthetic construct
RVQN

SEQ ID NO: 6004 - protein, 4 aa, synthetic construct
GIQN

SEQ ID NO: 6005 - protein, 4 aa, synthetic construct
KAQR

SEQ ID NO: 6006 - protein, 4 aa, synthetic construct
NCQN

SEQ ID NO: 6007 - protein, 4 aa, synthetic construct
KPFR

SEQ ID NO: 6008 - protein, 4 aa, synthetic construct
LAWN

SEQ ID NO: 6009 - protein, 4 aa, synthetic construct
KRSY

SEQ ID NO: 6010 - protein, 4 aa, synthetic construct
SYQN

SEQ ID NO: 6011 - protein, 4 aa, synthetic construct
WLQN

SEQ ID NO: 6012 - protein, 4 aa, synthetic construct
SCQN

SEQ ID NO: 6013 - protein, 4 aa, synthetic construct
SWLN

SEQ ID NO: 6014 - protein, 4 aa, synthetic construct
KRRA

SEQ ID NO: 6015 - protein, 4 aa, synthetic construct
KAQT

SEQ ID NO: 6016 - protein, 4 aa, synthetic construct
KGCT

SEQ ID NO: 6017 - protein, 4 aa, synthetic construct
KRYT

SEQ ID NO: 6018 - protein, 4 aa, synthetic construct
GCQN

SEQ ID NO: 6019 - protein, 4 aa, synthetic construct
FTPN

SEQ ID NO: 6020 - protein, 4 aa, synthetic construct
TTCN

SEQ ID NO: 6021 - protein, 4 aa, synthetic construct
KARM

SEQ ID NO: 6022 - protein, 4 aa, synthetic construct
KRQN

SEQ ID NO: 6023 - protein, 4 aa, synthetic construct
KCFL

SEQ ID NO: 6024 - protein, 4 aa, synthetic construct
VPQN

SEQ ID NO: 6025 - protein, 4 aa, synthetic construct
FWSN

SEQ ID NO: 6026 - protein, 4 aa, synthetic construct
KFKN

SEQ ID NO: 6027 - protein, 4 aa, synthetic construct
IKQN

SEQ ID NO: 6028 - protein, 4 aa, synthetic construct
KAPR

SEQ ID NO: 6029 - protein, 4 aa, synthetic construct
FRYN

SEQ ID NO: 6030 - protein, 4 aa, synthetic construct
KMIC

SEQ ID NO: 6031 - protein, 4 aa, synthetic construct
RWQN

SEQ ID NO: 6032 - protein, 4 aa, synthetic construct
PTQN

SEQ ID NO: 6033 - protein, 4 aa, synthetic construct
KWKS

SEQ ID NO: 6034 - protein, 4 aa, synthetic construct
YMRN

SEQ ID NO: 6035 - protein, 4 aa, synthetic construct
KAAR

SEQ ID NO: 6036 - protein, 4 aa, synthetic construct
LCQN

SEQ ID NO: 6037 - protein, 4 aa, synthetic construct
CCQN

SEQ ID NO: 6038 - protein, 4 aa, synthetic construct
CVQN

SEQ ID NO: 6039 - protein, 4 aa, synthetic construct
KLTR

SEQ ID NO: 6040 - protein, 4 aa, synthetic construct
KLCT

SEQ ID NO: 6041 - protein, 4 aa, synthetic construct
KIRG

SEQ ID NO: 6042 - protein, 4 aa, synthetic construct
YLVN

SEQ ID NO: 6043 - protein, 4 aa, synthetic construct
AFQN

SEQ ID NO: 6044 - protein, 4 aa, synthetic construct
KACQ

SEQ ID NO: 6045 - protein, 4 aa, synthetic construct
KWGL

SEQ ID NO: 6046 - protein, 4 aa, synthetic construct
KILR

SEQ ID NO: 6047 - protein, 4 aa, synthetic construct
FQIN

SEQ ID NO: 6048 - protein, 4 aa, synthetic construct
KACI

SEQ ID NO: 6049 - protein, 4 aa, synthetic construct
KALR

SEQ ID NO: 6050 - protein, 4 aa, synthetic construct
KAHA

SEQ ID NO: 6051 - protein, 4 aa, synthetic construct
LCLN

SEQ ID NO: 6052 - protein, 4 aa, synthetic construct
KAFV

SEQ ID NO: 6053 - protein, 4 aa, synthetic construct
PRQN

SEQ ID NO: 6054 - protein, 4 aa, synthetic construct
CPQN

SEQ ID NO: 6055 - protein, 4 aa, synthetic construct
KAQF

SEQ ID NO: 6056 - protein, 4 aa, synthetic construct
VRYN

SEQ ID NO: 6057 - protein, 4 aa, synthetic construct
VRCN

SEQ ID NO: 6058 - protein, 4 aa, synthetic construct
KMPC

SEQ ID NO: 6059 - protein, 4 aa, synthetic construct
KKTS

SEQ ID NO: 6060 - protein, 4 aa, synthetic construct
LPYN

SEQ ID NO: 6061 - protein, 4 aa, synthetic construct
YHQN

SEQ ID NO: 6062 - protein, 4 aa, synthetic construct
KAQS

SEQ ID NO: 6063 - protein, 4 aa, synthetic construct
YTRN

SEQ ID NO: 6064 - protein, 4 aa, synthetic construct
VYQN

SEQ ID NO: 6065 - protein, 4 aa, synthetic construct
RYQN

SEQ ID NO: 6066 - protein, 4 aa, synthetic construct
WLKN

SEQ ID NO: 6067 - protein, 4 aa, synthetic construct
KAQM

SEQ ID NO: 6068 - protein, 4 aa, synthetic construct
PAQN

SEQ ID NO: 6069 - protein, 4 aa, synthetic construct
MCTN

SEQ ID NO: 6070 - protein, 4 aa, synthetic construct
PPDN

SEQ ID NO: 6071 - protein, 4 aa, synthetic construct
KRNY

SEQ ID NO: 6072 - protein, 4 aa, synthetic construct
WTQN

SEQ ID NO: 6073 - protein, 4 aa, synthetic construct
KACR

SEQ ID NO: 6074 - protein, 4 aa, synthetic construct
RKQN

SEQ ID NO: 6075 - protein, 4 aa, synthetic construct
KCSV

SEQ ID NO: 6076 - protein, 4 aa, synthetic construct
KARI

SEQ ID NO: 6077 - protein, 4 aa, synthetic construct
FVQN

SEQ ID NO: 6078 - protein, 4 aa, synthetic construct
KLPK

SEQ ID NO: 6079 - protein, 4 aa, synthetic construct
KSEQ

SEQ ID NO: 6080 - protein, 4 aa, synthetic construct
VAQN

SEQ ID NO: 6081 - protein, 4 aa, synthetic construct
LYQN

SEQ ID NO: 6082 - protein, 4 aa, synthetic construct
KVRM

SEQ ID NO: 6083 - protein, 4 aa, synthetic construct
ALQN

SEQ ID NO: 6084 - protein, 4 aa, synthetic construct
SCTN

SEQ ID NO: 6085 - protein, 4 aa, synthetic construct
KNSR

SEQ ID NO: 6086 - protein, 4 aa, synthetic construct
KRKR

SEQ ID NO: 6087 - protein, 4 aa, synthetic construct
CTQN

SEQ ID NO: 6088 - protein, 4 aa, synthetic construct
TCLN

SEQ ID NO: 6089 - protein, 4 aa, synthetic construct
YARN

SEQ ID NO: 6090 - protein, 4 aa, synthetic construct
KQRP

SEQ ID NO: 6091 - protein, 4 aa, synthetic construct
KRVV

SEQ ID NO: 6092 - protein, 4 aa, synthetic construct
SGQN

SEQ ID NO: 6093 - protein, 4 aa, synthetic construct
YYSN

SEQ ID NO: 6094 - protein, 4 aa, synthetic construct
LTCN

SEQ ID NO: 6095 - protein, 4 aa, synthetic construct
CQSN

SEQ ID NO: 6096 - protein, 4 aa, synthetic construct
KAKG

SEQ ID NO: 6097 - protein, 4 aa, synthetic construct
KPQN

SEQ ID NO: 6098 - protein, 4 aa, synthetic construct
PFQN

SEQ ID NO: 6099 - protein, 4 aa, synthetic construct
KCTS

SEQ ID NO: 6100 - protein, 4 aa, synthetic construct
VFEN

SEQ ID NO: 6101 - protein, 4 aa, synthetic construct
KAKK

SEQ ID NO: 6102 - protein, 5 aa, synthetic construct
SKAQA

SEQ ID NO: 6103 - protein, 5 aa, synthetic construct
SKAQN

SEQ ID NO: 6104 - protein, 5 aa, synthetic construct
SMYMN

SEQ ID NO: 6105 - protein, 5 aa, synthetic construct
SKAFY

SEQ ID NO: 6106 - protein, 5 aa, synthetic construct
SKLKR

SEQ ID NO: 6107 - protein, 5 aa, synthetic construct
SKRHR

SEQ ID NO: 6108 - protein, 5 aa, synthetic construct
SKAQK

SEQ ID NO: 6109 - protein, 5 aa, synthetic construct
SKWRL

SEQ ID NO: 6110 - protein, 5 aa, synthetic construct
SRCRN

SEQ ID NO: 6111 - protein, 5 aa, synthetic construct
SFTCN

SEQ ID NO: 6112 - protein, 5 aa, synthetic construct
SKFFI

SEQ ID NO: 6113 - protein, 5 aa, synthetic construct
SKAQY

SEQ ID NO: 6114 - protein, 5 aa, synthetic construct
IVWQN

SEQ ID NO: 6115 - protein, 5 aa, synthetic construct
SKYFM

SEQ ID NO: 6116 - protein, 5 aa, synthetic construct
SKARQ

SEQ ID NO: 6117 - protein, 5 aa, synthetic construct
SCHQN

SEQ ID NO: 6118 - protein, 5 aa, synthetic construct
FPWQN

SEQ ID NO: 6119 - protein, 5 aa, synthetic construct
SKIRR

SEQ ID NO: 6120 - protein, 5 aa, synthetic construct
VYYQN

SEQ ID NO: 6121 - protein, 5 aa, synthetic construct
SLYWN

SEQ ID NO: 6122 - protein, 5 aa, synthetic construct
SKPKR

SEQ ID NO: 6123 - protein, 5 aa, synthetic construct
SKAFS

SEQ ID NO: 6124 - protein, 5 aa, synthetic construct
SRFWN

SEQ ID NO: 6125 - protein, 5 aa, synthetic construct
SKAQC

SEQ ID NO: 6126 - protein, 5 aa, synthetic construct
SRMRN

SEQ ID NO: 6127 - protein, 5 aa, synthetic construct
SVKKN

SEQ ID NO: 6128 - protein, 5 aa, synthetic construct
SWAPN

SEQ ID NO: 6129 - protein, 5 aa, synthetic construct
SLWKN

SEQ ID NO: 6130 - protein, 5 aa, synthetic construct
SKARW

SEQ ID NO: 6131 - protein, 5 aa, synthetic construct
SFRPN

SEQ ID NO: 6132 - protein, 5 aa, synthetic construct
SKKVF

SEQ ID NO: 6133 - protein, 5 aa, synthetic construct
SYAFN

SEQ ID NO: 6134 - protein, 5 aa, synthetic construct
SKACS

SEQ ID NO: 6135 - protein, 5 aa, synthetic construct
SKRLW

SEQ ID NO: 6136 - protein, 5 aa, synthetic construct
SCSRN

SEQ ID NO: 6137 - protein, 5 aa, synthetic construct
SRCPN

SEQ ID NO: 6138 - protein, 5 aa, synthetic construct
SGACN

SEQ ID NO: 6139 - protein, 5 aa, synthetic construct
SKFRQ

SEQ ID NO: 6140 - protein, 5 aa, synthetic construct
SFPFN

SEQ ID NO: 6141 - protein, 5 aa, synthetic construct
SFFGN

SEQ ID NO: 6142 - protein, 5 aa, synthetic construct
SMCQN

SEQ ID NO: 6143 - protein, 5 aa, synthetic construct
SKLFW

SEQ ID NO: 6144 - protein, 5 aa, synthetic construct
SKTRK

SEQ ID NO: 6145 - protein, 5 aa, synthetic construct
SGKRN

SEQ ID NO: 6146 - protein, 5 aa, synthetic construct
FYRQN

SEQ ID NO: 6147 - protein, 5 aa, synthetic construct
CRVQN

SEQ ID NO: 6148 - protein, 5 aa, synthetic construct
YGIQN

SEQ ID NO: 6149 - protein, 5 aa, synthetic construct
SKAQR

SEQ ID NO: 6150 - protein, 5 aa, synthetic construct
VNCQN

SEQ ID NO: 6151 - protein, 5 aa, synthetic construct
SKPFR

SEQ ID NO: 6152 - protein, 5 aa, synthetic construct
SLAWN

SEQ ID NO: 6153 - protein, 5 aa, synthetic construct
SKRSY

SEQ ID NO: 6154 - protein, 5 aa, synthetic construct
WSYQN

SEQ ID NO: 6155 - protein, 5 aa, synthetic construct
RWLQN

SEQ ID NO: 6156 - protein, 5 aa, synthetic construct
PSCQN

SEQ ID NO: 6157 - protein, 5 aa, synthetic construct
SSWLN

SEQ ID NO: 6158 - protein, 5 aa, synthetic construct
SKRRA

SEQ ID NO: 6159 - protein, 5 aa, synthetic construct
SKAQT

SEQ ID NO: 6160 - protein, 5 aa, synthetic construct
SKGCT

SEQ ID NO: 6161 - protein, 5 aa, synthetic construct
VPWQN

SEQ ID NO: 6162 - protein, 5 aa, synthetic construct
SKRYT

SEQ ID NO: 6163 - protein, 5 aa, synthetic construct
SGCQN

SEQ ID NO: 6164 - protein, 5 aa, synthetic construct
SFTPN

SEQ ID NO: 6165 - protein, 5 aa, synthetic construct
STTCN

SEQ ID NO: 6166 - protein, 5 aa, synthetic construct
SKARM

SEQ ID NO: 6167 - protein, 5 aa, synthetic construct
PKRQN

SEQ ID NO: 6168 - protein, 5 aa, synthetic construct
SKCFL

SEQ ID NO: 6169 - protein, 5 aa, synthetic construct
WVPQN

SEQ ID NO: 6170 - protein, 5 aa, synthetic construct
SFWSN

SEQ ID NO: 6171 - protein, 5 aa, synthetic construct
SKFKN

SEQ ID NO: 6172 - protein, 5 aa, synthetic construct
RIKQN

SEQ ID NO: 6173 - protein, 5 aa, synthetic construct
SKAPR

SEQ ID NO: 6174 - protein, 5 aa, synthetic construct
SFRYN

SEQ ID NO: 6175 - protein, 5 aa, synthetic construct
SKMIC

SEQ ID NO: 6176 - protein, 5 aa, synthetic construct
LRWQN

SEQ ID NO: 6177 - protein, 5 aa, synthetic construct
LPTQN

SEQ ID NO: 6178 - protein, 5 aa, synthetic construct
SKWKS

SEQ ID NO: 6179 - protein, 5 aa, synthetic construct
SYMRN

SEQ ID NO: 6180 - protein, 5 aa, synthetic construct
SKAAR

SEQ ID NO: 6181 - protein, 5 aa, synthetic construct
LLCQN

SEQ ID NO: 6182 - protein, 5 aa, synthetic construct
RCCQN

SEQ ID NO: 6183 - protein, 5 aa, synthetic construct
LCVQN

SEQ ID NO: 6184 - protein, 5 aa, synthetic construct
SKLTR

SEQ ID NO: 6185 - protein, 5 aa, synthetic construct
SKLCT

SEQ ID NO: 6186 - protein, 5 aa, synthetic construct
SKIRG

SEQ ID NO: 6187 - protein, 5 aa, synthetic construct
SYLVN

SEQ ID NO: 6188 - protein, 5 aa, synthetic construct
QGCQN

SEQ ID NO: 6189 - protein, 5 aa, synthetic construct
MAFQN

SEQ ID NO: 6190 - protein, 5 aa, synthetic construct
SKACQ

SEQ ID NO: 6191 - protein, 5 aa, synthetic construct
SKWGL

SEQ ID NO: 6192 - protein, 5 aa, synthetic construct
SKILR

SEQ ID NO: 6193 - protein, 5 aa, synthetic construct
SFQIN

SEQ ID NO: 6194 - protein, 5 aa, synthetic construct
SKACI

SEQ ID NO: 6195 - protein, 5 aa, synthetic construct
SKALR

SEQ ID NO: 6196 - protein, 5 aa, synthetic construct
SKAHA

SEQ ID NO: 6197 - protein, 5 aa, synthetic construct
SLCLN

SEQ ID NO: 6198 - protein, 5 aa, synthetic construct
SKAFV

SEQ ID NO: 6199 - protein, 5 aa, synthetic construct
RPWQN

SEQ ID NO: 6200 - protein, 5 aa, synthetic construct
RPRQN

SEQ ID NO: 6201 - protein, 5 aa, synthetic construct
SCPQN

SEQ ID NO: 6202 - protein, 5 aa, synthetic construct
SKAQF

SEQ ID NO: 6203 - protein, 5 aa, synthetic construct
SVRYN

SEQ ID NO: 6204 - protein, 5 aa, synthetic construct
SVRCN

SEQ ID NO: 6205 - protein, 5 aa, synthetic construct
SKMPC

SEQ ID NO: 6206 - protein, 5 aa, synthetic construct
SKKTS

SEQ ID NO: 6207 - protein, 5 aa, synthetic construct
SLPYN

SEQ ID NO: 6208 - protein, 5 aa, synthetic construct
VYHQN

SEQ ID NO: 6209 - protein, 5 aa, synthetic construct
SKAQS

SEQ ID NO: 6210 - protein, 5 aa, synthetic construct
SYTRN

SEQ ID NO: 6211 - protein, 5 aa, synthetic construct
LVYQN

SEQ ID NO: 6212 - protein, 5 aa, synthetic construct
YRYQN

SEQ ID NO: 6213 - protein, 5 aa, synthetic construct
SWLKN

SEQ ID NO: 6214 - protein, 5 aa, synthetic construct
SKAQM

SEQ ID NO: 6215 - protein, 5 aa, synthetic construct
CPAQN

SEQ ID NO: 6216 - protein, 5 aa, synthetic construct
SMCTN

SEQ ID NO: 6217 - protein, 5 aa, synthetic construct
SPPDN

SEQ ID NO: 6218 - protein, 5 aa, synthetic construct
SKRNY

SEQ ID NO: 6219 - protein, 5 aa, synthetic construct
RWTQN

SEQ ID NO: 6220 - protein, 5 aa, synthetic construct
SKACR

SEQ ID NO: 6221 - protein, 5 aa, synthetic construct
PRKQN

SEQ ID NO: 6222 - protein, 5 aa, synthetic construct
SKCSV

SEQ ID NO: 6223 - protein, 5 aa, synthetic construct
SKARI

SEQ ID NO: 6224 - protein, 5 aa, synthetic construct
PFVQN

SEQ ID NO: 6225 - protein, 5 aa, synthetic construct
SKLPK

SEQ ID NO: 6226 - protein, 5 aa, synthetic construct
SKSEQ

SEQ ID NO: 6227 - protein, 5 aa, synthetic construct
WVAQN

SEQ ID NO: 6228 - protein, 5 aa, synthetic construct
SLYQN

SEQ ID NO: 6229 - protein, 5 aa, synthetic construct
SKVRM

SEQ ID NO: 6230 - protein, 5 aa, synthetic construct
CALQN

SEQ ID NO: 6231 - protein, 5 aa, synthetic construct
SSCTN

SEQ ID NO: 6232 - protein, 5 aa, synthetic construct
SKNSR

SEQ ID NO: 6233 - protein, 5 aa, synthetic construct
SKRKR

SEQ ID NO: 6234 - protein, 5 aa, synthetic construct
LCTQN

SEQ ID NO: 6235 - protein, 5 aa, synthetic construct
STCLN

SEQ ID NO: 6236 - protein, 5 aa, synthetic construct
SYARN

SEQ ID NO: 6237 - protein, 5 aa, synthetic construct
SKQRP

SEQ ID NO: 6238 - protein, 5 aa, synthetic construct
SKRVV

SEQ ID NO: 6239 - protein, 5 aa, synthetic construct
KSGQN

SEQ ID NO: 6240 - protein, 5 aa, synthetic construct
SYYSN

SEQ ID NO: 6241 - protein, 5 aa, synthetic construct
SLTCN

SEQ ID NO: 6242 - protein, 5 aa, synthetic construct
SCQSN

SEQ ID NO: 6243 - protein, 5 aa, synthetic construct
SKAKG

SEQ ID NO: 6244 - protein, 5 aa, synthetic construct
SKPQN

SEQ ID NO: 6245 - protein, 5 aa, synthetic construct
FPFQN

SEQ ID NO: 6246 - protein, 5 aa, synthetic construct
SKCTS

SEQ ID NO: 6247 - protein, 5 aa, synthetic construct
SVFEN

SEQ ID NO: 6248 - protein, 5 aa, synthetic construct
SKAKK

SEQ ID NO: 6249 - protein, 5 aa, synthetic construct
GRYQN

SEQ ID NO: 6250 - protein, 11 aa, synthetic construct
GSGSPHSKAQA

SEQ ID NO: 6251 - protein, 11 aa, synthetic construct
GSGSPHSKAQN

SEQ ID NO: 6252 - protein, 11 aa, synthetic construct
GSGSPHSMYMN

SEQ ID NO: 6253 - protein, 11 aa, synthetic construct
GSGSPHSKAFY

SEQ ID NO: 6254 - protein, 11 aa, synthetic construct
GSGSPHSKLKR

SEQ ID NO: 6255 - protein, 11 aa, synthetic construct
GSGSPHSKRHR

SEQ ID NO: 6256 - protein, 11 aa, synthetic construct
GSGSPHSKAQK

SEQ ID NO: 6257 - protein, 11 aa, synthetic construct
GSGSPHSKWRL

SEQ ID NO: 6258 - protein, 11 aa, synthetic construct
GSGSPHSRCRN

SEQ ID NO: 6259 - protein, 11 aa, synthetic construct
GSGSPHSFTCN

SEQ ID NO: 6260 - protein, 11 aa, synthetic construct
GSGSPHSKFFI

SEQ ID NO: 6261 - protein, 11 aa, synthetic construct
GSGSPHSKAQY

SEQ ID NO: 6262 - protein, 11 aa, synthetic construct
GSGSPHIVWQN

SEQ ID NO: 6263 - protein, 11 aa, synthetic construct
GSGSPHSKYFM

SEQ ID NO: 6264 - protein, 11 aa, synthetic construct
GSGSPHSKARQ

SEQ ID NO: 6265 - protein, 11 aa, synthetic construct
GSGSPHSCHQN

SEQ ID NO: 6266 - protein, 11 aa, synthetic construct
GSGSPHFPWQN

SEQ ID NO: 6267 - protein, 11 aa, synthetic construct
GSGSPHSKIRR

SEQ ID NO: 6268 - protein, 11 aa, synthetic construct
GSGSPHVYYQN

SEQ ID NO: 6269 - protein, 11 aa, synthetic construct
GSGSPHSLYWN

SEQ ID NO: 6270 - protein, 11 aa, synthetic construct
GSGSPHSKPKR

SEQ ID NO: 6271 - protein, 11 aa, synthetic construct
GSGSPHSKAFS

SEQ ID NO: 6272 - protein, 11 aa, synthetic construct
GSGSPHSRFWN

SEQ ID NO: 6273 - protein, 11 aa, synthetic construct
GSGSPHSKAQC

SEQ ID NO: 6274 - protein, 11 aa, synthetic construct
GSGSPHSRMRN

SEQ ID NO: 6275 - protein, 11 aa, synthetic construct
GSGSPHSVKKN

SEQ ID NO: 6276 - protein, 11 aa, synthetic construct
GSGSPHSWAPN

SEQ ID NO: 6277 - protein, 11 aa, synthetic construct
GSGSPHSLWKN

SEQ ID NO: 6278 - protein, 11 aa, synthetic construct
GSGSPHSKARW

SEQ ID NO: 6279 - protein, 11 aa, synthetic construct
GSGSPHSFRPN

SEQ ID NO: 6280 - protein, 11 aa, synthetic construct
GSGSPHSKKVF

SEQ ID NO: 6281 - protein, 11 aa, synthetic construct
GSGSPHSYAFN

SEQ ID NO: 6282 - protein, 11 aa, synthetic construct
GSGSPHSKACS

SEQ ID NO: 6283 - protein, 11 aa, synthetic construct
GSGSPHSKRLW

SEQ ID NO: 6284 - protein, 11 aa, synthetic construct
GSGSPHSCSRN

SEQ ID NO: 6285 - protein, 11 aa, synthetic construct
GSGSPHSRCPN

SEQ ID NO: 6286 - protein, 11 aa, synthetic construct
GSGSPHSGACN

SEQ ID NO: 6287 - protein, 11 aa, synthetic construct
GSGSPHSKFRQ

SEQ ID NO: 6288 - protein, 11 aa, synthetic construct
GSGSPHSFPFN

SEQ ID NO: 6289 - protein, 11 aa, synthetic construct
GSGSPHSFFGN

SEQ ID NO: 6290 - protein, 11 aa, synthetic construct
GSGSPHSMCQN

SEQ ID NO: 6291 - protein, 11 aa, synthetic construct
GSGSPHSKLFW

SEQ ID NO: 6292 - protein, 11 aa, synthetic construct
GSGSPHSKTRK

SEQ ID NO: 6293 - protein, 11 aa, synthetic construct
GSGSPHSGKRN

SEQ ID NO: 6294 - protein, 11 aa, synthetic construct
GSGSPHFYRQN

SEQ ID NO: 6295 - protein, 11 aa, synthetic construct
GSGSPHCRVQN

SEQ ID NO: 6296 - protein, 11 aa, synthetic construct
GSGSPHYGIQN

SEQ ID NO: 6297 - protein, 11 aa, synthetic construct
GSGSPHSKAQR

SEQ ID NO: 6298 - protein, 11 aa, synthetic construct
GSGSPHVNCQN

SEQ ID NO: 6299 - protein, 11 aa, synthetic construct
GSGSPHSKPFR

SEQ ID NO: 6300 - protein, 11 aa, synthetic construct
GSGSPHSLAWN

SEQ ID NO: 6301 - protein, 11 aa, synthetic construct
GSGSPHSKRSY

SEQ ID NO: 6302 - protein, 11 aa, synthetic construct
GSGSPHWSYQN

SEQ ID NO: 6303 - protein, 11 aa, synthetic construct
GSGSPHRWLQN

SEQ ID NO: 6304 - protein, 11 aa, synthetic construct
GSGSPHPSCQN

SEQ ID NO: 6305 - protein, 11 aa, synthetic construct
GSGSPHSSWLN

SEQ ID NO: 6306 - protein, 11 aa, synthetic construct
GSGSPHSKRRA

SEQ ID NO: 6307 - protein, 11 aa, synthetic construct
GSGSPHSKAQT

SEQ ID NO: 6308 - protein, 11 aa, synthetic construct
GSGSPHSKGCT

SEQ ID NO: 6309 - protein, 11 aa, synthetic construct
GSGSPHVPWQN

SEQ ID NO: 6310 - protein, 11 aa, synthetic construct
GSGSPHSKRYT

SEQ ID NO: 6311 - protein, 11 aa, synthetic construct
GSGSPHSGCQN

SEQ ID NO: 6312 - protein, 11 aa, synthetic construct
GSGSPHSFTPN

SEQ ID NO: 6313 - protein, 11 aa, synthetic construct
GSGSPHSTTCN

SEQ ID NO: 6314 - protein, 11 aa, synthetic construct
GSGSPHSKARM

SEQ ID NO: 6315 - protein, 11 aa, synthetic construct
GSGSPHPKRQN

SEQ ID NO: 6316 - protein, 11 aa, synthetic construct
GSGSPHSKCFL

SEQ ID NO: 6317 - protein, 11 aa, synthetic construct
GSGSPHWVPQN

SEQ ID NO: 6318 - protein, 11 aa, synthetic construct
GSGSPHSFWSN

SEQ ID NO: 6319 - protein, 11 aa, synthetic construct
GSGSPHSKFKN

SEQ ID NO: 6320 - protein, 11 aa, synthetic construct
GSGSPHRIKQN

SEQ ID NO: 6321 - protein, 11 aa, synthetic construct
GSGSPHSKAPR

SEQ ID NO: 6322 - protein, 11 aa, synthetic construct
GSGSPHSFRYN

SEQ ID NO: 6323 - protein, 11 aa, synthetic construct
GSGSPHSKMIC

SEQ ID NO: 6324 - protein, 11 aa, synthetic construct
GSGSPHLRWQN

SEQ ID NO: 6325 - protein, 11 aa, synthetic construct
GSGSPHLPTQN

SEQ ID NO: 6326 - protein, 11 aa, synthetic construct
GSGSPHSKWKS

SEQ ID NO: 6327 - protein, 11 aa, synthetic construct
GSGSPHSYMRN

SEQ ID NO: 6328 - protein, 11 aa, synthetic construct
GSGSPHSKAAR

SEQ ID NO: 6329 - protein, 11 aa, synthetic construct
GSGSPHLLCQN

SEQ ID NO: 6330 - protein, 11 aa, synthetic construct
GSGSPHRCCQN

SEQ ID NO: 6331 - protein, 11 aa, synthetic construct
GSGSPHLCVQN

SEQ ID NO: 6332 - protein, 11 aa, synthetic construct
GSGSPHSKLTR

SEQ ID NO: 6333 - protein, 11 aa, synthetic construct
GSGSPHSKLCT

SEQ ID NO: 6334 - protein, 11 aa, synthetic construct
GSGSPHSKIRG

SEQ ID NO: 6335 - protein, 11 aa, synthetic construct
GSGSPHSYLVN

SEQ ID NO: 6336 - protein, 11 aa, synthetic construct
GSGSPHQGCQN

SEQ ID NO: 6337 - protein, 11 aa, synthetic construct
GSGSPHMAFQN

SEQ ID NO: 6338 - protein, 11 aa, synthetic construct
GSGSPHSKACQ

SEQ ID NO: 6339 - protein, 11 aa, synthetic construct
GSGSPHSKWGL

SEQ ID NO: 6340 - protein, 11 aa, synthetic construct
GSGSPHSKILR

SEQ ID NO: 6341 - protein, 11 aa, synthetic construct
GSGSPHSFQIN

SEQ ID NO: 6342 - protein, 11 aa, synthetic construct
GSGSPHSKACI

SEQ ID NO: 6343 - protein, 11 aa, synthetic construct
GSGSPHSKALR

SEQ ID NO: 6344 - protein, 11 aa, synthetic construct
GSGSPHSKAHA

SEQ ID NO: 6345 - protein, 11 aa, synthetic construct
GSGSPHSLCLN

SEQ ID NO: 6346 - protein, 11 aa, synthetic construct
GSGSPHSKAFV

SEQ ID NO: 6347 - protein, 11 aa, synthetic construct
GSGSPHRPWQN

SEQ ID NO: 6348 - protein, 11 aa, synthetic construct
GSGSPHRPRQN

SEQ ID NO: 6349 - protein, 11 aa, synthetic construct
GSGSPHSCPQN

SEQ ID NO: 6350 - protein, 11 aa, synthetic construct
GSGSPHSKAQF

SEQ ID NO: 6351 - protein, 11 aa, synthetic construct
GSGSPHSVRYN

SEQ ID NO: 6352 - protein, 11 aa, synthetic construct
GSGSPHSVRCN

SEQ ID NO: 6353 - protein, 11 aa, synthetic construct
GSGSPHSKMPC

SEQ ID NO: 6354 - protein, 11 aa, synthetic construct
GSGSPHSKKTS

SEQ ID NO: 6355 - protein, 11 aa, synthetic construct
GSGSPHSLPYN

SEQ ID NO: 6356 - protein, 11 aa, synthetic construct
GSGSPHVYHQN

SEQ ID NO: 6357 - protein, 11 aa, synthetic construct
GSGSPHSKAQS

SEQ ID NO: 6358 - protein, 11 aa, synthetic construct
GSGSPHSYTRN

SEQ ID NO: 6359 - protein, 11 aa, synthetic construct
GSGSPHLVYQN

SEQ ID NO: 6360 - protein, 11 aa, synthetic construct
GSGSPHYRYQN

SEQ ID NO: 6361 - protein, 11 aa, synthetic construct
GSGSPHSWLKN

SEQ ID NO: 6362 - protein, 11 aa, synthetic construct
GSGSPHSKAQM

SEQ ID NO: 6363 - protein, 11 aa, synthetic construct
GSGSPHCPAQN

SEQ ID NO: 6364 - protein, 11 aa, synthetic construct
GSGSPHSMCTN

SEQ ID NO: 6365 - protein, 11 aa, synthetic construct
GSGSPHSPPDN

SEQ ID NO: 6366 - protein, 11 aa, synthetic construct
GSGSPHSKRNY

SEQ ID NO: 6367 - protein, 11 aa, synthetic construct
GSGSPHRWTQN

SEQ ID NO: 6368 - protein, 11 aa, synthetic construct
GSGSPHSKACR

SEQ ID NO: 6369 - protein, 11 aa, synthetic construct
GSGSPHPRKQN

SEQ ID NO: 6370 - protein, 11 aa, synthetic construct
GSGSPHSKCSV

SEQ ID NO: 6371 - protein, 11 aa, synthetic construct
GSGSPHSKARI

SEQ ID NO: 6372 - protein, 11 aa, synthetic construct
GSGSPHPFVQN

SEQ ID NO: 6373 - protein, 11 aa, synthetic construct
GSGSPHSKLPK

SEQ ID NO: 6374 - protein, 11 aa, synthetic construct
GSGSPHSKSEQ

SEQ ID NO: 6375 - protein, 11 aa, synthetic construct
GSGSPHWVAQN

SEQ ID NO: 6376 - protein, 11 aa, synthetic construct
GSGSPHSLYQN

SEQ ID NO: 6377 - protein, 11 aa, synthetic construct
GSGSPHSKVRM

SEQ ID NO: 6378 - protein, 11 aa, synthetic construct
GSGSPHCALQN

SEQ ID NO: 6379 - protein, 11 aa, synthetic construct
GSGSPHSSCTN

SEQ ID NO: 6380 - protein, 11 aa, synthetic construct
GSGSPHSKNSR

SEQ ID NO: 6381 - protein, 11 aa, synthetic construct
GSGSPHSKRKR

SEQ ID NO: 6382 - protein, 11 aa, synthetic construct
GSGSPHLCTQN

SEQ ID NO: 6383 - protein, 11 aa, synthetic construct
GSGSPHSTCLN

SEQ ID NO: 6384 - protein, 11 aa, synthetic construct
GSGSPHSYARN

SEQ ID NO: 6385 - protein, 11 aa, synthetic construct
GSGSPHSKQRP

SEQ ID NO: 6386 - protein, 11 aa, synthetic construct
GSGSPHSKRVV

SEQ ID NO: 6387 - protein, 11 aa, synthetic construct
GSGSPHKSGQN

SEQ ID NO: 6388 - protein, 11 aa, synthetic construct
GSGSPHSYYSN

SEQ ID NO: 6389 - protein, 11 aa, synthetic construct
GSGSPHSLTCN

SEQ ID NO: 6390 - protein, 11 aa, synthetic construct
GSGSPHSCQSN

SEQ ID NO: 6391 - protein, 11 aa, synthetic construct
GSGSPHSKAKG

SEQ ID NO: 6392 - protein, 11 aa, synthetic construct
GSGSPHSKPQN

SEQ ID NO: 6393 - protein, 11 aa, synthetic construct
GSGSPHFPFQN

SEQ ID NO: 6394 - protein, 11 aa, synthetic construct
GSGSPHSKCTS

SEQ ID NO: 6395 - protein, 11 aa, synthetic construct
GSGSPHSVFEN

SEQ ID NO: 6396 - protein, 11 aa, synthetic construct
GSGSPHSKAKK

SEQ ID NO: 6397 - protein, 11 aa, synthetic construct
GSGSPHGRYQN

SEQ ID NO: 6398 - protein, 4 aa, synthetic construct
SPHK

SEQ ID NO: 6399 - protein, 11 aa, synthetic construct
ERVSGSPHSKA

SEQ ID NO: 6400 - protein, 12 aa, synthetic construct
AEIGHDSPHKSG

SEQ ID NO: 6401 - protein, 11 aa, synthetic construct
EKMSGSPHSKA

SEQ ID NO: 6402 - protein, 11 aa, synthetic construct
HDSPHSKAQNL

SEQ ID NO: 6403 - protein, 11 aa, synthetic construct
VNGHDSPHSKA

SEQ ID NO: 6404 - protein, 27 aa, synthetic construct
KTINGSGQNQQTLKFSVAGPSNMAVQG

SEQ ID NO: 6405 - protein, 12 aa, synthetic construct
KTINGSGQNQQT

SEQ ID NO: 6406 - protein, 8 aa, synthetic construct
GSGQNQQT

SEQ ID NO: 6407 - protein, 9 aa, synthetic construct
  VARIANT 1: note = Any amino acid
  VARIANT 7: note = Any amino acid
  VARIANT 9: note = Any amino acid
XSGSPHXKX

SEQ ID NO: 6408 - protein, 9 aa, synthetic construct
  VARIANT 1: note = Any amino acid
  VARIANT 2: note = A, C, D, E, F, G, H, I, K, L, M, N, P, Q, R, T, V, W or Y
  VARIANT 3: note = A, C, D, E, F, H, I, K, L, M, N, P, Q, R, S, T, V, W or Y
  VARIANT 8: note = Any amino acid
  VARIANT 9: note = Any amino acid
XXXSPHKXX

SEQ ID NO: 6409-6412 - skipped (4 entries)

SEQ ID NO: 6413 - protein, 594 aa, Homo sapiens
MAPIGLKAVVGEKIMHDVIKKVKKKGEWKVLVVDQLSMRMLSSCCKMTDIMTEGITIVEDINKRREPLPSLEAVYLITPSEKSVHSLISDFKDPPTAKYRAAHVFFTDSCPDALFNELVKSRAAKVIKTLTEINIAFLPYESQVYSLDSADSFQSFYSPHKAQMKNPILERLAEQIATLCATLKEYPAVRYRGEYKDNALLAQLIQDKLDAYKADDPTMGEGPDKARSQLLILDRGFDPSSPVLHELTFQAMSYDLLPIENDVYKYETSGIGEARVKEVLLDEDDDLWIALRHKHIAEVSQEVTRSLKDFSSSKRMNTGEKTTMRDLSQMLKKMPQYQKELSKYSTHLHLAEDCMKHYQGTVDKLCRVEQDLAMGTDAEGEKIKDPMRAIVPILLDANVSTYDKIRIILLYIFLKNGITEENLNKLIQHAQIPPEDSEIITNMAHLGVPIVTDSTLRRRSKPERKERISEQTYQLSRWTPIIKDIMEDTIEDKLDTKHYPYISTRSSASFSTTAVSARYGHWHKNKAPGEYRSGPRLIIFILGGVSLNEMRCAYEVTQANGKWEVLIGSTHILTPQKLLDTLKKLNKTDEEISS

SEQ ID NO: 6414 - DNA, 1785 bp, Homo sapiens
  source 1..1785: mol_type = genomic DNA
atggcccccattggcctcaaagctgttgtcggagagaagattatgcatgatgtgataaagaaggtcaagaagaagggggaatggaaggtgctggtggtggatcagttaagcatgaggatgctgtcctcctgctgcaagatgacagacatcatgaccgagggcataacgattgtggaagatatcaataagcgcagagagccgctccccagcctggaggctgtgtatctcatcactccatccgagaagtccgtccactctctcatcagtgactttaaggacccgccgactgctaaataccgggctgcacacgtcttcttcactgactcttgtccagatgccctgtttaatgaactggtaaaatcccgagcagccaaagtcatcaaaactctgacggaaatcaatattgcatttctcccgtatgaatcccaggtctattccttggactctgctgactctttccaaagcttctacagtccccacaaggctcagatgaagaatcctatactggagcgcctggcagagcagatcgcgaccctttgtgccaccctgaaggagtacccggctgtgcggtatcggggggaatacaaggacaatgccctgctggctcagctaatccaggacaagctcgatgcctataaagctgatgatccaacaatgggggagggcccagacaaggcacgctcccagctcctgatcctggatcgaggctttgaccccagctcccctgtgctccatgaattgacttttcaggctatgagttatgatctgctgcctatcgaaaatgatgtatacaagtatgagaccagcggcatcggggaggcacgggtgaaggaggtgctcctggacgaggacgacgacctgtggatagcactgcgccacaagcacatcgcagaggtgtcccaggaagtcacccggtctctgaaagatttttcttctagcaagagaatgaatactggagagaagaccaccatgcgggacctgtcccagatgctgaagaagatgcctcagtaccagaaagagctcagcaagtactccacccacctgcaccttgctgaggactgtatgaagcattaccaaggcaccgtagacaaactctgccgagtggagcaggacctggccatgggcacagatgctgagggagagaagatcaaggaccctatgcgagccatcgtccccattctgctggatgccaatgtcagcacttatgacaaaatccgcatcatccttctctacatctttttgaagaatggcatcacggaggaaaacctgaacaaactgatccagcacgcccagatacccccggaggatagtgagatcatcaccaacatggctcacctcggcgtgcccatcgtcaccgattccacgctgcgtcgccggagcaagccggagcggaaggaacgcatcagcgagcagacctaccagctctcacggtggactccgattatcaaggacatcatggaggacactattgaggacaaacttgacaccaaacactacccttatatctctacccgttcctctgcctccttcagcaccaccgccgtcagcgcccgctatgggcactggcataagaacaaggccccaggcgagtaccgcagtggcccccgcctcatcattttcatccttgggggtgtgagcctgaatgagatgcgctgcgcctacgaggtgacccaggccaacggaaagtgggaggtgctgataggatccacacacatcctcaccccacagaaactgctggacacactgaagaaactgaataaaacagatgaagaaataagcagttaa

SEQ ID NO: 6415 - protein, 591 aa, Homo sapiens
MAPIGLKAVVGEKIMHDVIKKVKKKGEWKVLVVDQLSMRMLSSCCKMTDIMTEGITIVEDINKRREPLPSLEAVYLITPSEKSVHSLISDFKDPPTAKYRAAHVFFTDYALFNELVKSRAAKVIKTLTEINIAFLPYESQVYSLDSADSFQSFYSPHKAQMKNPILERLAEQIATLCATLKEYPAVRYRGEYKDNALLAQLIQDKLDAYKADDPTMGEGPDKARSQLLILDRGFDPSSPVLHELTFQAMSYDLLPIENDVYKYETSGIGEARVKEVLLDEDDDLWIALRHKHIAEVSQEVTRSLKDFSSSKRMNTGEKTTMRDLSQMLKKMPQYQKELSKYSTHLHLAEDCMKHYQGTVDKLCRVEQDLAMGTDAEGEKIKDPMRAIVPILLDANVSTYDKIRIILLYIFLKNGITEENLNKLIQHAQIPPEDSEIITNMAHLGVPIVTDSTLRRRSKPERKERISEQTYQLSRWTPIIKDIMEDTIEDKLDTKHYPYISTRSSASFSTTAVSARYGHWHKNKAPGEYRSGPRLIIFILGGVSLNEMRCAYEVTQANGKWEVLIGSTHILTPQKLLDTLKKLNKTDEEISS

SEQ ID NO: 6416 - DNA, 3745 bp, Homo sapiens
  source 1..3745: mol_type = genomic DNA
agtcggtccctagcgcggctgcggggcggagagctgcggctggcccagcgcgcccacctgaggaggcggcggggtccgcaggcgtcgcgggacgaggagatcggagccgggagactcgcgcagcgccatggcccccattggcctcaaagctgttgtcggagagaagattatgcatgatgtgataaagaaggtcaagaagaagggggaatggaaggtgctggtggtggatcagttaagcatgaggatgctgtcctcctgctgcaagatgacagacatcatgaccgagggcataacgattgtggaagatatcaataagcgcagagagccgctccccagcctggaggctgtgtatctcatcactccatccgagaagtccgtccactctctcatcagtgactttaaggacccgccgactgctaaataccgggctgcacacgtcttcttcactgactatgccctgtttaatgaactggtaaaatcccgagcagccaaagtcatcaaaactctgacggaaatcaatattgcatttctcccgtatgaatcccaggtctattccttggactctgctgactctttccaaagcttctacagtccccacaaggctcagatgaagaatcctatactggagcgcctggcagagcagatcgcgaccctttgtgccaccctgaaggagtacccggctgtgcggtatcggggggaatacaaggacaatgccctgctggctcagctaatccaggacaagctcgatgcctataaagctgatgatccaacaatgggggagggcccagacaaggcacgctcccagctcctgatcctggatcgaggctttgaccccagctcccctgtgctccatgaattgacttttcaggctatgagttatgatctgctgcctatcgaaaatgatgtatacaagtatgagaccagcggcatcggggaggcacgggtgaaggaggtgctcctggacgaggacgacgacctgtggatagcactgcgccacaagcacatcgcagaggtgtcccaggaagtcacccggtctctgaaagatttttcttctagcaagagaatgaatactggagagaagaccaccatgcgggacctgtcccagatgctgaagaagatgcctcagtaccagaaagagctcagcaagtactccacccacctgcaccttgctgaggactgtatgaagcattaccaaggcaccgtagacaaactctgccgagtggagcaggacctggccatgggcacagatgctgagggagagaagatcaaggaccctatgcgagccatcgtccccattctgctggatgccaatgtcagcacttatgacaaaatccgcatcatccttctctacatctttttgaagaatggcatcacggaggaaaacctgaacaaactgatccagcacgcccagatacccccggaggatagtgagatcatcaccaacatggctcacctcggcgtgcccatcgtcaccgattccacgctgcgtcgccggagcaagccggagcggaaggaacgcatcagcgagcagacctaccagctctcacggtggactccgattatcaaggacatcatggaggacactattgaggacaaacttgacaccaaacactacccttatatctctacccgttcctctgcctccttcagcaccaccgccgtcagcgcccgctatgggcactggcataagaacaaggccccaggcgagtaccgcagtggcccccgcctcatcattttcatccttgggggtgtgagcctgaatgagatgcgctgcgcctacgaggtgacccaggccaacggaaagtgggaggtgctgataggatccacacacatcctcaccccacagaaactgctggacacactgaagaaactgaataaaacagatgaagaaataagcagttaaaaaaataagtcgcccctccaaaacacgcccccatcccacagcgctccgcagcttcccaccaccgcccgcctcagttcctttgcgtctgttgcctccccagccctgcacgccctggctggcactgttgccgctgcattctcgtgttcagtgatgccctcttcttgtttgaaacaaaagaaaataatgcattgtgttttttaaaaagagtatcttatacatgtatcctaaaaagagaagctcatgtgcaattggtgcacagcaggagaaatttctggactgttaggatgaatggacgccttctccccgttatttaagatttgtgaccttgtacataaccctgggtgacgtgcacattgcttgggtatggaacggtagaaatttgggtgtttttaaaaccttgtttggggttgttcctgtccttgttgagaatcatagagatgtctgtgttcttggagtatttcacactgaggactaatctgctatcttcattccagtccctacccctcagtgcctgctctcatccaaataacctgggaggtgacaatcaggatatctcaggaggtccaaggtggaacagacctctttgcctttcccagcgtctcatacccccggtagtgcagctgtgggtggaggctggggtgtctgcacgaagtcaggccagcgtcctcctccacagcctgtcactgccccctccccagcctgtgtccacagtgctgtgatcccgagggaagtcctccagtctaagtcacagtgccctgacaggtgagaagcaaactcccgctggaagcctccatctctttggaaaaacagttagtctggagcctgtggcccaggcccttctgtccccaggcatcatcccaacagctcattttccctagtccgccttcgttcaagggtcaggaatggaccagaacagatgggttctggaggcccctgaacagagggctatggctgtggagaaggttcttggcccgttggactcacacagaccctgtaccctctcggcaagcatcttcagtcagattatcctcagtttcagatacttcataataccttgtgttgtgtggggtcatacatcatcgtgtttgtaagagaagatggtcattttattctctgtataaaacttagctctaaagcagaaactaaagcagcaaatgcaggaaggctgtctcgccatcctcaagactcagcagctctcattctccagtggtgagcacaccatttgtgctgctgctgttgtcgtgaaatataataacagtggaagtcacaaaaatgtcccctgcccagccccctcgccgcccttgacctcctgcaggccatgtgtgtattacttgtctagtgatgtcctctcaaagtgctgtacgcgagctcggcgccacctccgcctccctttcagagcctgctccccgccctctctgctcgctgcattgtggtgttctcttctcaaggctttgaaatctccccttgcactgagattagtcgtcagatctctccccgtctccctcccaacttatacgacctgatttccttaggacggaaccgcaggcacctgcgccgggcgtcttactcccgctgcttgttctgtcccctccctcggaccaaacagtgctcatgcttcaggaccttgtttgtcgaagatgttggtttccctttctctgttatttatataaaaataatttatcaaaaggatattttaaaaaagctagtctgtcttgaaacttgtttaccttaaaattatcagaatctcagtgtttgaaagtactgaagcacaaacatatatcatctctgtaccattctgtactaaagcacttgagtctaataaataaagaaatcagcacccct

SEQ ID NO: 6417 - protein, 589 aa, Homo sapiens
MHDVIKKVKKKGEWKVLVVDQLSMRMLSSCCKMTDIMTEGITIVEDINKRREPLPSLEAVYLITPSEKSVHSLISDFKDPPTAKYRAAHVFFTDSCPDALFNELVKSRAAKVIKTLTEINIAFLPYESQVYSLDSADSFQSFYSPHKAQMKNPILERLAEQIATLCATLKEYPAVRYRGEYKDNALLAQLIQDKLDAYKADDPTMGEGPDKARSQLLILDRGFDPSSPVLHELTFQAMSYDLLPIENDVYKYETSGIGEARVKEVLLDEDDDLWIALRHKHIAEVSQEVTRSLKDFSSSKRMNTGEKTTMRDLSQMLKKMPQYQKELSKYSTHLHLAEDCMKHYQGTVDKLCRVEQDLAMGTDAEGEKIKDPMRAIVPILLDANVSTYDKIRIILLYIFLKNGITEENLNKLIQHAQIPPEDSEIITNMAHLGVPIVTDSTLRRRSKPERKERISEQTYQLSRWTPIIKDIMEDTIEDKLDTKHYPYISTRSSASFSTTAVSARYGHWHKNKAPGEYRSGPRLIIFILGGVSLNEMRCAYEVTQANGKWEVLIGSTHILTPTKFLMDLRHPDFRESSRVSFEDQAPTME

SEQ ID NO: 6418 - DNA, 3975 bp, Homo sapiens
  source 1..3975: mol_type = genomic DNA
agtcggtccctagcgcggctgcggggcggagagctgcggctggcccagcgcgcccacctgaggaggcggcggggtccgcaggcgtcgcgggacgaggagatcggagccgggagactcgcgcagcgccatggcccccattggcctcaaagctgttgtcggagagagaaagaggaagactacctagacatgttgctccagagcagaatttccagcagtagattgaaccttcggaggccgagtcccagcccagtgtaaactgagattatgcatgatgtgataaagaaggtcaagaagaagggggaatggaaggtgctggtggtggatcagttaagcatgaggatgctgtcctcctgctgcaagatgacagacatcatgaccgagggcataacgattgtggaagatatcaataagcgcagagagccgctccccagcctggaggctgtgtatctcatcactccatccgagaagtccgtccactctctcatcagtgactttaaggacccgccgactgctaaataccgggctgcacacgtcttcttcactgactcttgtccagatgccctgtttaatgaactggtaaaatcccgagcagccaaagtcatcaaaactctgacggaaatcaatattgcatttctcccgtatgaatcccaggtctattccttggactctgctgactctttccaaagcttctacagtccccacaaggctcagatgaagaatcctatactggagcgcctggcagagcagatcgcgaccctttgtgccaccctgaaggagtacccggctgtgcggtatcggggggaatacaaggacaatgccctgctggctcagctaatccaggacaagctcgatgcctataaagctgatgatccaacaatgggggagggcccagacaaggcacgctcccagctcctgatcctggatcgaggctttgaccccagctcccctgtgctccatgaattgacttttcaggctatgagttatgatctgctgcctatcgaaaatgatgtatacaagtatgagaccagcggcatcggggaggcacgggtgaaggaggtgctcctggacgaggacgacgacctgtggatagcactgcgccacaagcacatcgcagaggtgtcccaggaagtcacccggtctctgaaagatttttcttctagcaagagaatgaatactggagagaagaccaccatgcgggacctgtcccagatgctgaagaagatgcctcagtaccagaaagagctcagcaagtactccacccacctgcaccttgctgaggactgtatgaagcattaccaaggcaccgtagacaaactctgccgagtggagcaggacctggccatgggcacagatgctgagggagagaagatcaaggaccctatgcgagccatcgtccccattctgctggatgccaatgtcagcacttatgacaaaatccgcatcatccttctctacatctttttgaagaatggcatcacggaggaaaacctgaacaaactgatccagcacgcccagatacccccggaggatagtgagatcatcaccaacatggctcacctcggcgtgcccatcgtcaccgattccacgctgcgtcgccggagcaagccggagcggaaggaacgcatcagcgagcagacctaccagctctcacggtggactccgattatcaaggacatcatggaggacactattgaggacaaacttgacaccaaacactacccttatatctctacccgttcctctgcctccttcagcaccaccgccgtcagcgcccgctatgggcactggcataagaacaaggccccaggcgagtaccgcagtggcccccgcctcatcattttcatccttgggggtgtgagcctgaatgagatgcgctgcgcctacgaggtgacccaggccaacggaaagtgggaggtgctgataggttctactcacattcttactcccaccaaatttctcatggacctgagacaccccgacttcagggagtcctctagggtatcttttgaggatcaggctccaacaatggagtgagagccaaagaaacaaagatccacacacatcctcaccccacagaaactgctggacacactgaagaaactgaataaaacagatgaagaaataagcagttaaaaaaataagtcgcccctccaaaacacgcccccatcccacagcgctccgcagcttcccaccaccgcccgcctcagttcctttgcgtctgttgcctccccagccctgcacgccctggctggcactgttgccgctgcattctcgtgttcagtgatgccctcttcttgtttgaaacaaaagaaaataatgcattgtgttttttaaaaagagtatcttatacatgtatcctaaaaagagaagctcatgtgcaattggtgcacagcaggagaaatttctggactgttaggatgaatggacgccttctccccgttatttaagatttgtgaccttgtacataaccctgggtgacgtgcacattgcttgggtatggaacggtagaaatttgggtgtttttaaaaccttgtttggggttgttcctgtccttgttgagaatcatagagatgtctgtgttcttggagtatttcacactgaggactaatctgctatcttcattccagtccctacccctcagtgcctgctctcatccaaataacctgggaggtgacaatcaggatatctcaggaggtccaaggtggaacagacctctttgcctttcccagcgtctcatacccccggtagtgcagctgtgggtggaggctggggtgtctgcacgaagtcaggccagcgtcctcctccacagcctgtcactgccccctccccagcctgtgtccacagtgctgtgatcccgagggaagtcctccagtctaagtcacagtgccctgacaggtgagaagcaaactcccgctggaagcctccatctctttggaaaaacagttagtctggagcctgtggcccaggcccttctgtccccaggcatcatcccaacagctcattttccctagtccgccttcgttcaagggtcaggaatggaccagaacagatgggttctggaggcccctgaacagagggctatggctgtggagaaggttcttggcccgttggactcacacagaccctgtaccctctcggcaagcatcttcagtcagattatcctcagtttcagatacttcataataccttgtgttgtgtggggtcatacatcatcgtgtttgtaagagaagatggtcattttattctctgtataaaacttagctctaaagcagaaactaaagcagcaaatgcaggaaggctgtctcgccatcctcaagactcagcagctctcattctccagtggtgagcacaccatttgtgctgctgctgttgtcgtgaaatataataacagtggaagtcacaaaaatgtcccctgcccagccccctcgccgcccttgacctcctgcaggccatgtgtgtattacttgtctagtgatgtcctctcaaagtgctgtacgcgagctcggcgccacctccgcctccctttcagagcctgctccccgccctctctgctcgctgcattgtggtgttctcttctcaaggctttgaaatctccccttgcactgagattagtcgtcagatctctccccgtctccctcccaacttatacgacctgatttccttaggacggaaccgcaggcacctgcgccgggcgtcttactcccgctgcttgttctgtcccctccctcggaccaaacagtgctcatgcttcaggaccttgtttgtcgaagatgttggtttccctttctctgttatttatataaaaataatttatcaaaaggatattttaaaaaagctagtctgtcttgaaacttgtttaccttaaaattatcagaatctcagtgtttgaaagtactgaagcacaaacatatatcatctctgtaccattctgtactaaagcacttgagtctaataaataaagaaatcagcacccct

SEQ ID NO: 6419 - protein, 589 aa, Homo sapiens; identical to SEQ ID NO: 6417

SEQ ID NO: 6420 - DNA, 4070 bp, Homo sapiens
  source 1..4070: mol_type = genomic DNA
agtcggtccctagcgcggctgcggggcggagagctgcggctggcccagcgcgcccacctgaggaggcggcggggtccgcaggcgtcgcgggacgaggagatcggagccgggagactcgcgcagcgccatggcccccattggcctcaaagctgttgtcggagagagatatatacctaggaatggagttgctggatctctatgtttggttatttgaggagctgccggcctgttttccacatcagctgtaccattttacattctcaccagcagtgcatgacggtccagtgcctttttatcttactgcgcttaaggtgtaattccttctttctcagactggactgtaaattctttgagagattatgcatgatgtgataaagaaggtcaagaagaagggggaatggaaggtgctggtggtggatcagttaagcatgaggatgctgtcctcctgctgcaagatgacagacatcatgaccgagggcataacgattgtggaagatatcaataagcgcagagagccgctccccagcctggaggctgtgtatctcatcactccatccgagaagtccgtccactctctcatcagtgactttaaggacccgccgactgctaaataccgggctgcacacgtcttcttcactgactcttgtccagatgccctgtttaatgaactggtaaaatcccgagcagccaaagtcatcaaaactctgacggaaatcaatattgcatttctcccgtatgaatcccaggtctattccttggactctgctgactctttccaaagcttctacagtccccacaaggctcagatgaagaatcctatactggagcgcctggcagagcagatcgcgaccctttgtgccaccctgaaggagtacccggctgtgcggtatcggggggaatacaaggacaatgccctgctggctcagctaatccaggacaagctcgatgcctataaagctgatgatccaacaatgggggagggcccagacaaggcacgctcccagctcctgatcctggatcgaggctttgaccccagctcccctgtgctccatgaattgacttttcaggctatgagttatgatctgctgcctatcgaaaatgatgtatacaagtatgagaccagcggcatcggggaggcacgggtgaaggaggtgctcctggacgaggacgacgacctgtggatagcactgcgccacaagcacatcgcagaggtgtcccaggaagtcacccggtctctgaaagatttttcttctagcaagagaatgaatactggagagaagaccaccatgcgggacctgtcccagatgctgaagaagatgcctcagtaccagaaagagctcagcaagtactccacccacctgcaccttgctgaggactgtatgaagcattaccaaggcaccgtagacaaactctgccgagtggagcaggacctggccatgggcacagatgctgagggagagaagatcaaggaccctatgcgagccatcgtccccattctgctggatgccaatgtcagcacttatgacaaaatccgcatcatccttctctacatctttttgaagaatggcatcacggaggaaaacctgaacaaactgatccagcacgcccagatacccccggaggatagtgagatcatcaccaacatggctcacctcggcgtgcccatcgtcaccgattccacgctgcgtcgccggagcaagccggagcggaaggaacgcatcagcgagcagacctaccagctctcacggtggactccgattatcaaggacatcatggaggacactattgaggacaaacttgacaccaaacactacccttatatctctacccgttcctctgcctccttcagcaccaccgccgtcagcgcccgctatgggcactggcataagaacaaggccccaggcgagtaccgcagtggcccccgcctcatcattttcatccttgggggtgtgagcctgaatgagatgcgctgcgcctacgaggtgacccaggccaacggaaagtgggaggtgctgataggttctactcacattcttactcccaccaaatttctcatggacctgagacaccccgacttcagggagtcctctagggtatcttttgaggatcaggctccaacaatggagtgagagccaaagaaacaaagatccacacacatcctcaccccacagaaactgctggacacactgaagaaactgaataaaacagatgaagaaataagcagttaaaaaaataagtcgcccctccaaaacacgcccccatcccacagcgctccgcagcttcccaccaccgcccgcctcagttcctttgcgtctgttgcctccccagccctgcacgccctggctggcactgttgccgctgcattctcgtgttcagtgatgccctcttcttgtttgaaacaaaagaaaataatgcattgtgttttttaaaaagagtatcttatacatgtatcctaaaaagagaagctcatgtgcaattggtgcacagcaggagaaatttctggactgttaggatgaatggacgccttctccccgttatttaagatttgtgaccttgtacataaccctgggtgacgtgcacattgcttgggtatggaacggtagaaatttgggtgtttttaaaaccttgtttggggttgttcctgtccttgttgagaatcatagagatgtctgtgttcttggagtatttcacactgaggactaatctgctatcttcattccagtccctacccctcagtgcctgctctcatccaaataacctgggaggtgacaatcaggatatctcaggaggtccaaggtggaacagacctctttgcctttcccagcgtctcatacccccggtagtgcagctgtgggtggaggctggggtgtctgcacgaagtcaggccagcgtcctcctccacagcctgtcactgccccctccccagcctgtgtccacagtgctgtgatcccgagggaagtcctccagtctaagtcacagtgccctgacaggtgagaagcaaactcccgctggaagcctccatctctttggaaaaacagttagtctggagcctgtggcccaggcccttctgtccccaggcatcatcccaacagctcattttccctagtccgccttcgttcaagggtcaggaatggaccagaacagatgggttctggaggcccctgaacagagggctatggctgtggagaaggttcttggcccgttggactcacacagaccctgtaccctctcggcaagcatcttcagtcagattatcctcagtttcagatacttcataataccttgtgttgtgtggggtcatacatcatcgtgtttgtaagagaagatggtcattttattctctgtataaaacttagctctaaagcagaaactaaagcagcaaatgcaggaaggctgtctcgccatcctcaagactcagcagctctcattctccagtggtgagcacaccatttgtgctgctgctgttgtcgtgaaatataataacagtggaagtcacaaaaatgtcccctgcccagccccctcgccgcccttgacctcctgcaggccatgtgtgtattacttgtctagtgatgtcctctcaaagtgctgtacgcgagctcggcgccacctccgcctccctttcagagcctgctccccgccctctctgctcgctgcattgtggtgttctcttctcaaggctttgaaatctccccttgcactgagattagtcgtcagatctctccccgtctccctcccaacttatacgacctgatttccttaggacggaaccgcaggcacctgcgccgggcgtcttactcccgctgcttgttctgtcccctccctcggaccaaacagtgctcatgcttcaggaccttgtttgtcgaagatgttggtttccctttctctgttatttatataaaaataatttatcaaaaggatattttaaaaaagctagtctgtcttgaaacttgtttaccttaaaattatcagaatctcagtgtttgaaagtactgaagcacaaacatatatcatctctgtaccattctgtactaaagcacttgagtctaataaataaagaaatcagcacccct

SEQ ID NO: 6421 - protein, 580 aa, Homo sapiens
MHDVIKKVKKKGEWKVLVVDQLSMRMLSSCCKMTDIMTEGITIVEDINKRREPLPSLEAVYLITPSEKSVHSLISDFKDPPTAKYRAAHVFFTDSCPDALFNELVKSRAAKVIKTLTEINIAFLPYESQVYSLDSADSFQSFYSPHKAQMKNPILERLAEQIATLCATLKEYPAVRYRGEYKDNALLAQLIQDKLDAYKADDPTMGEGPDKARSQLLILDRGFDPSSPVLHELTFQAMSYDLLPIENDVYKYETSGIGEARVKEVLLDEDDDLWIALRHKHIAEVSQEVTRSLKDFSSSKRMNTGEKTTMRDLSQMLKKMPQYQKELSKYSTHLHLAEDCMKHYQGTVDKLCRVEQDLAMGTDAEGEKIKDPMRAIVPILLDANVSTYDKIRIILLYIFLKNGITEENLNKLIQHAQIPPEDSEIITNMAHLGVPIVTDSTLRRRSKPERKERISEQTYQLSRWTPIIKDIMEDTIEDKLDTKHYPYISTRSSASFSTTAVSARYGHWHKNKAPGEYRSGPRLIIFILGGVSLNEMRCAYEVTQANGKWEVLIGSTHILTPQKLLDTLKKLNKTDEEISS

SEQ ID NO: 6422 - DNA, 3726 bp, Homo sapiens
  source 1..3726: mol_type = genomic DNA
agaaagaggaaagacaggacccgagcggggtttcaggcagatggagcgcgtcggtagcctgtggccagggatcccagcaccgacgggaaagaggaggcctgggtaccctgcgccccgggcgcgcgcggcgcgtgagagattatgcatgatgtgataaagaaggtcaagaagaagggggaatggaaggtgctggtggtggatcagttaagcatgaggatgctgtcctcctgctgcaagatgacagacatcatgaccgagggcataacgattgtggaagatatcaataagcgcagagagccgctccccagcctggaggctgtgtatctcatcactccatccgagaagtccgtccactctctcatcagtgactttaaggacccgccgactgctaaataccgggctgcacacgtcttcttcactgactcttgtccagatgccctgtttaatgaactggtaaaatcccgagcagccaaagtcatcaaaactctgacggaaatcaatattgcatttctcccgtatgaatcccaggtctattccttggactctgctgactctttccaaagcttctacagtccccacaaggctcagatgaagaatcctatactggagcgcctggcagagcagatcgcgaccctttgtgccaccctgaaggagtacccggctgtgcggtatcggggggaatacaaggacaatgccctgctggctcagctaatccaggacaagctcgatgcctataaagctgatgatccaacaatgggggagggcccagacaaggcacgctcccagctcctgatcctggatcgaggctttgaccccagctcccctgtgctccatgaattgacttttcaggctatgagttatgatctgctgcctatcgaaaatgatgtatacaagtatgagaccagcggcatcggggaggcacgggtgaaggaggtgctcctggacgaggacgacgacctgtggatagcactgcgccacaagcacatcgcagaggtgtcccaggaagtcacccggtctctgaaagatttttcttctagcaagagaatgaatactggagagaagaccaccatgcgggacctgtcccagatgctgaagaagatgcctcagtaccagaaagagctcagcaagtactccacccacctgcaccttgctgaggactgtatgaagcattaccaaggcaccgtagacaaactctgccgagtggagcaggacctggccatgggcacagatgctgagggagagaagatcaaggaccctatgcgagccatcgtccccattctgctggatgccaatgtcagcacttatgacaaaatccgcatcatccttctctacatctttttgaagaatggcatcacggaggaaaacctgaacaaactgatccagcacgcccagatacccccggaggatagtgagatcatcaccaacatggctcacctcggcgtgcccatcgtcaccgattccacgctgcgtcgccggagcaagccggagcggaaggaacgcatcagcgagcagacctaccagctctcacggtggactccgattatcaaggacatcatggaggacactattgaggacaaacttgacaccaaacactacccttatatctctacccgttcctctgcctccttcagcaccaccgccgtcagcgcccgctatgggcactggcataagaacaaggccccaggcgagtaccgcagtggcccccgcctcatcattttcatccttgggggtgtgagcctgaatgagatgcgctgcgcctacgaggtgacccaggccaacggaaagtgggaggtgctgataggatccacacacatcctcaccccacagaaactgctggacacactgaagaaactgaataaaacagatgaagaaataagcagttaaaaaaataagtcgcccctccaaaacacgcccccatcccacagcgctccgcagcttcccaccaccgcccgcctcagttcctttgcgtctgttgcctccccagccctgcacgccctggctggcactgttgccgctgcattctcgtgttcagtgatgccctcttcttgtttgaaacaaaagaaaataatgcattgtgttttttaaaaagagtatcttatacatgtatcctaaaaagagaagctcatgtgcaattggtgcacagcaggagaaatttctggactgttaggatgaatggacgccttctccccgttatttaagatttgtgaccttgtacataaccctgggtgacgtgcacattgcttgggtatggaacggtagaaatttgggtgtttttaaaaccttgtttggggttgttcctgtccttgttgagaatcatagagatgtctgtgttcttggagtatttcacactgaggactaatctgctatcttcattccagtccctacccctcagtgcctgctctcatccaaataacctgggaggtgacaatcaggatatctcaggaggtccaaggtggaacagacctctttgcctttcccagcgtctcatacccccggtagtgcagctgtgggtggaggctggggtgtctgcacgaagtcaggccagcgtcctcctccacagcctgtcactgccccctccccagcctgtgtccacagtgctgtgatcccgagggaagtcctccagtctaagtcacagtgccctgacaggtgagaagcaaactcccgctggaagcctccatctctttggaaaaacagttagtctggagcctgtggcccaggcccttctgtccccaggcatcatcccaacagctcattttccctagtccgccttcgttcaagggtcaggaatggaccagaacagatgggttctggaggcccctgaacagagggctatggctgtggagaaggttcttggcccgttggactcacacagaccctgtaccctctcggcaagcatcttcagtcagattatcctcagtttcagatacttcataataccttgtgttgtgtggggtcatacatcatcgtgtttgtaagagaagatggtcattttattctctgtataaaacttagctctaaagcagaaactaaagcagcaaatgcaggaaggctgtctcgccatcctcaagactcagcagctctcattctccagtggtgagcacaccatttgtgctgctgctgttgtcgtgaaatataataacagtggaagtcacaaaaatgtcccctgcccagccccctcgccgcccttgacctcctgcaggccatgtgtgtattacttgtctagtgatgtcctctcaaagtgctgtacgcgagctcggcgccacctccgcctccctttcagagcctgctccccgccctctctgctcgctgcattgtggtgttctcttctcaaggctttgaaatctccccttgcactgagattagtcgtcagatctctccccgtctccctcccaacttatacgacctgatttccttaggacggaaccgcaggcacctgcgccgggcgtcttactcccgctgcttgttctgtcccctccctcggaccaaacagtgctcatgcttcaggaccttgtttgtcgaagatgttggtttccctttctctgttatttatataaaaataatttatcaaaaggatattttaaaaaagctagtctgtcttgaaacttgtttaccttaaaattatcagaatctcagtgtttgaaagtactgaagcacaaacatatatcatctctgtaccattctgtactaaagcacttgagtctaataaataaagaaatcagcacccct

SEQ ID NO: 6423 - protein, 580 aa, Homo sapiens; identical to SEQ ID NO: 6421

SEQ ID NO: 6424 - DNA, 3944 bp, Homo sapiens
  source 1..3944: mol_type = genomic DNA
agtcggtccctagcgcggctgcggggcggagagctgcggctggcccagcgcgcccacctgaggaggcggcggggtccgcaggcgtcgcgggacgaggagatcggagccgggagactcgcgcagcgccatggcccccattggcctcaaagctgttgtcggagagagatatatacctaggaatggagttgctggatctctatgtttggttatttgaggagctgccggcctgttttccacatcagctgtaccattttacattctcaccagcagtgcatgacggtccagtgcctttttatcttactgcgcttaaggtgtaattccttctttctcagactggactgtaaattctttgagagattatgcatgatgtgataaagaaggtcaagaagaagggggaatggaaggtgctggtggtggatcagttaagcatgaggatgctgtcctcctgctgcaagatgacagacatcatgaccgagggcataacgattgtggaagatatcaataagcgcagagagccgctccccagcctggaggctgtgtatctcatcactccatccgagaagtccgtccactctctcatcagtgactttaaggacccgccgactgctaaataccgggctgcacacgtcttcttcactgactcttgtccagatgccctgtttaatgaactggtaaaatcccgagcagccaaagtcatcaaaactctgacggaaatcaatattgcatttctcccgtatgaatcccaggtctattccttggactctgctgactctttccaaagcttctacagtccccacaaggctcagatgaagaatcctatactggagcgcctggcagagcagatcgcgaccctttgtgccaccctgaaggagtacccggctgtgcggtatcggggggaatacaaggacaatgccctgctggctcagctaatccaggacaagctcgatgcctataaagctgatgatccaacaatgggggagggcccagacaaggcacgctcccagctcctgatcctggatcgaggctttgaccccagctcccctgtgctccatgaattgacttttcaggctatgagttatgatctgctgcctatcgaaaatgatgtatacaagtatgagaccagcggcatcggggaggcacgggtgaaggaggtgctcctggacgaggacgacgacctgtggatagcactgcgccacaagcacatcgcagaggtgtcccaggaagtcacccggtctctgaaagatttttcttctagcaagagaatgaatactggagagaagaccaccatgcgggacctgtcccagatgctgaagaagatgcctcagtaccagaaagagctcagcaagtactccacccacctgcaccttgctgaggactgtatgaagcattaccaaggcaccgtagacaaactctgccgagtggagcaggacctggccatgggcacagatgctgagggagagaagatcaaggaccctatgcgagccatcgtccccattctgctggatgccaatgtcagcacttatgacaaaatccgcatcatccttctctacatctttttgaagaatggcatcacggaggaaaacctgaacaaactgatccagcacgcccagatacccccggaggatagtgagatcatcaccaacatggctcacctcggcgtgcccatcgtcaccgattccacgctgcgtcgccggagcaagccggagcggaaggaacgcatcagcgagcagacctaccagctctcacggtggactccgattatcaaggacatcatggaggacactattgaggacaaacttgacaccaaacactacccttatatctctacccgttcctctgcctccttcagcaccaccgccgtcagcgcccgctatgggcactggcataagaacaaggccccaggcgagtaccgcagtggcccccgcctcatcattttcatccttgggggtgtgagcctgaatgagatgcgctgcgcctacgaggtgacccaggccaacggaaagtgggaggtgctgataggatccacacacatcctcaccccacagaaactgctggacacactgaagaaactgaataaaacagatgaagaaataagcagttaaaaaaataagtcgcccctccaaaacacgcccccatcccacagcgctccgcagcttcccaccaccgcccgcctcagttcctttgcgtctgttgcctccccagccctgcacgccctggctggcactgttgccgctgcattctcgtgttcagtgatgccctcttcttgtttgaaacaaaagaaaataatgcattgtgttttttaaaaagagtatcttatacatgtatcctaaaaagagaagctcatgtgcaattggtgcacagcaggagaaatttctggactgttaggatgaatggacgccttctccccgttatttaagatttgtgaccttgtacataaccctgggtgacgtgcacattgcttgggtatggaacggtagaaatttgggtgtttttaaaaccttgtttggggttgttcctgtccttgttgagaatcatagagatgtctgtgttcttggagtatttcacactgaggactaatctgctatcttcattccagtccctacccctcagtgcctgctctcatccaaataacctgggaggtgacaatcaggatatctcaggaggtccaaggtggaacagacctctttgcctttcccagcgtctcatacccccggtagtgcagctgtgggtggaggctggggtgtctgcacgaagtcaggccagcgtcctcctccacagcctgtcactgccccctccccagcctgtgtccacagtgctgtgatcccgagggaagtcctccagtctaagtcacagtgccctgacaggtgagaagcaaactcccgctggaagcctccatctctttggaaaaacagttagtctggagcctgtggcccaggcccttctgtccccaggcatcatcccaacagctcattttccctagtccgccttcgttcaagggtcaggaatggaccagaacagatgggttctggaggcccctgaacagagggctatggctgtggagaaggttcttggcccgttggactcacacagaccctgtaccctctcggcaagcatcttcagtcagattatcctcagtttcagatacttcataataccttgtgttgtgtggggtcatacatcatcgtgtttgtaagagaagatggtcattttattctctgtataaaacttagctctaaagcagaaactaaagcagcaaatgcaggaaggctgtctcgccatcctcaagactcagcagctctcattctccagtggtgagcacaccatttgtgctgctgctgttgtcgtgaaatataataacagtggaagtcacaaaaatgtcccctgcccagccccctcgccgcccttgacctcctgcaggccatgtgtgtattacttgtctagtgatgtcctctcaaagtgctgtacgcgagctcggcgccacctccgcctccctttcagagcctgctccccgccctctctgctcgctgcattgtggtgttctcttctcaaggctttgaaatctccccttgcactgagattagtcgtcagatctctccccgtctccctcccaacttatacgacctgatttccttaggacggaaccgcaggcacctgcgccgggcgtcttactcccgctgcttgttctgtcccctccctcggaccaaacagtgctcatgcttcaggaccttgtttgtcgaagatgttggtttccctttctctgttatttatataaaaataatttatcaaaaggatattttaaaaaagctagtctgtcttgaaacttgtttaccttaaaattatcagaatctcagtgtttgaaagtactgaagcacaaacatatatcatctctgtaccattctgtactaaagcacttgagtctaataaataaagaaatcagcacccct

SEQ ID NO: 6425 - protein, 580 aa, Homo sapiens; identical to SEQ ID NO: 6421

SEQ ID NO: 6426 - DNA, 3849 bp, Homo sapiens
  source 1..3849: mol_type = genomic DNA
agtcggtccctagcgcggctgcggggcggagagctgcggctggcccagcgcgcccacctgaggaggcggcggggtccgcaggcgtcgcgggacgaggagatcggagccgggagactcgcgcagcgccatggcccccattggcctcaaagctgttgtcggagagagaaagaggaagactacctagacatgttgctccagagcagaatttccagcagtagattgaaccttcggaggccgagtcccagcccagtgtaaactgagattatgcatgatgtgataaagaaggtcaagaagaagggggaatggaaggtgctggtggtggatcagttaagcatgaggatgctgtcctcctgctgcaagatgacagacatcatgaccgagggcataacgattgtggaagatatcaataagcgcagagagccgctccccagcctggaggctgtgtatctcatcactccatccgagaagtccgtccactctctcatcagtgactttaaggacccgccgactgctaaataccgggctgcacacgtcttcttcactgactcttgtccagatgccctgtttaatgaactggtaaaatcccgagcagccaaagtcatcaaaactctgacggaaatcaatattgcatttctcccgtatgaatcccaggtctattccttggactctgctgactctttccaaagcttctacagtccccacaaggctcagatgaagaatcctatactggagcgcctggcagagcagatcgcgaccctttgtgccaccctgaaggagtacccggctgtgcggtatcggggggaatacaaggacaatgccctgctggctcagctaatccaggacaagctcgatgcctataaagctgatgatccaacaatgggggagggcccagacaaggcacgctcccagctcctgatcctggatcgaggctttgaccccagctcccctgtgctccatgaattgacttttcaggctatgagttatgatctgctgcctatcgaaaatgatgtatacaagtatgagaccagcggcatcggggaggcacgggtgaaggaggtgctcctggacgaggacgacgacctgtggatagcactgcgccacaagcacatcgcagaggtgtcccaggaagtcacccggtctctgaaagatttttcttctagcaagagaatgaatactggagagaagaccaccatgcgggacctgtcccagatgctgaagaagatgcctcagtaccagaaagagctcagcaagtactccacccacctgcaccttgctgaggactgtatgaagcattaccaaggcaccgtagacaaactctgccgagtggagcaggacctggccatgggcacagatgctgagggagagaagatcaaggaccctatgcgagccatcgtccccattctgctggatgccaatgtcagcacttatgacaaaatccgcatcatccttctctacatctttttgaagaatggcatcacggaggaaaacctgaacaaactgatccagcacgcccagatacccccggaggatagtgagatcatcaccaacatggctcacctcggcgtgcccatcgtcaccgattccacgctgcgtcgccggagcaagccggagcggaaggaacgcatcagcgagcagacctaccagctctcacggtggactccgattatcaaggacatcatggaggacactattgaggacaaacttgacaccaaacactacccttatatctctacccgttcctctgcctccttcagcaccaccgccgtcagcgcccgctatgggcactggcataagaacaaggccccaggcgagtaccgcagtggcccccgcctcatcattttcatccttgggggtgtgagcctgaatgagatgcgctgcgcctacgaggtgacccaggccaacggaaagtgggaggtgctgataggatccacacacatcctcaccccacagaaactgctggacacactgaagaaactgaataaaacagatgaagaaataagcagttaaaaaaataagtcgcccctccaaaacacgcccccatcccacagcgctccgcagcttcccaccaccgcccgcctcagttcctttgcgtctgttgcctccccagccctgcacgccctggctggcactgttgccgctgcattctcgtgttcagtgatgccctcttcttgtttgaaacaaaagaaaataatgcattgtgttttttaaaaagagtatcttatacatgtatcctaaaaagagaagctcatgtgcaattggtgcacagcaggagaaatttctggactgttaggatgaatggacgccttctccccgttatttaagatttgtgaccttgtacataaccctgggtgacgtgcacattgcttgggtatggaacggtagaaatttgggtgtttttaaaaccttgtttggggttgttcctgtccttgttgagaatcatagagatgtctgtgttcttggagtatttcacactgaggactaatctgctatcttcattccagtccctacccctcagtgcctgctctcatccaaataacctgggaggtgacaatcaggatatctcaggaggtccaaggtggaacagacctctttgcctttcccagcgtctcatacccccggtagtgcagctgtgggtggaggctggggtgtctgcacgaagtcaggccagcgtcctcctccacagcctgtcactgccccctccccagcctgtgtccacagtgctgtgatcccgagggaagtcctccagtctaagtcacagtgccctgacaggtgagaagcaaactcccgctggaagcctccatctctttggaaaaacagttagtctggagcctgtggcccaggcccttctgtccccaggcatcatcccaacagctcattttccctagtccgccttcgttcaagggtcaggaatggaccagaacagatgggttctggaggcccctgaacagagggctatggctgtggagaaggttcttggcccgttggactcacacagaccctgtaccctctcggcaagcatcttcagtcagattatcctcagtttcagatacttcataataccttgtgttgtgtggggtcatacatcatcgtgtttgtaagagaagatggtcattttattctctgtataaaacttagctctaaagcagaaactaaagcagcaaatgcaggaaggctgtctcgccatcctcaagactcagcagctctcattctccagtggtgagcacaccatttgtgctgctgctgttgtcgtgaaatataataacagtggaagtcacaaaaatgtcccctgcccagccccctcgccgcccttgacctcctgcaggccatgtgtgtattacttgtctagtgatgtcctctcaaagtgctgtacgcgagctcggcgccacctccgcctccctttcagagcctgctccccgccctctctgctcgctgcattgtggtgttctcttctcaaggctttgaaatctccccttgcactgagattagtcgtcagatctctccccgtctccctcccaacttatacgacctgatttccttaggacggaaccgcaggcacctgcgccgggcgtcttactcccgctgcttgttctgtcccctccctcggaccaaacagtgctcatgcttcaggaccttgtttgtcgaagatgttggtttccctttctctgttatttatataaaaataatttatcaaaaggatattttaaaaaagctagtctgtcttgaaacttgtttaccttaaaattatcagaatctcagtgtttgaaagtactgaagcacaaacatatatcatctctgtaccattctgtactaaagcacttgagtctaataaataaagaaatcagcacccct

SEQ ID NO: 6427 - protein, 580 aa, Homo sapiens; identical to SEQ ID NO: 6421

SEQ ID NO: 6428 - DNA, 3856 bp, Homo sapiens
  source 1..3856: mol_type = genomic DNA
agtcggtccctagcgcggctgcggggcggagagctgcggctggcccagcgcgcccacctgaggaggcggcggggtccgcaggcgtcgcgggacgaggagatcggagccgggagactcgcgcagcgccatggcccccattggcctcaaagctgttgtcggagagagaaagaggaagactacctagacatgttgctccagagcagaatttccagcagtagattgaaccttcggaggccgagtcccagcccagtgtaaactggtaaagaagattatgcatgatgtgataaagaaggtcaagaagaagggggaatggaaggtgctggtggtggatcagttaagcatgaggatgctgtcctcctgctgcaagatgacagacatcatgaccgagggcataacgattgtggaagatatcaataagcgcagagagccgctccccagcctggaggctgtgtatctcatcactccatccgagaagtccgtccactctctcatcagtgactttaaggacccgccgactgctaaataccgggctgcacacgtcttcttcactgactcttgtccagatgccctgtttaatgaactggtaaaatcccgagcagccaaagtcatcaaaactctgacggaaatcaatattgcatttctcccgtatgaatcccaggtctattccttggactctgctgactctttccaaagcttctacagtccccacaaggctcagatgaagaatcctatactggagcgcctggcagagcagatcgcgaccctttgtgccaccctgaaggagtacccggctgtgcggtatcggggggaatacaaggacaatgccctgctggctcagctaatccaggacaagctcgatgcctataaagctgatgatccaacaatgggggagggcccagacaaggcacgctcccagctcctgatcctggatcgaggctttgaccccagctcccctgtgctccatgaattgacttttcaggctatgagttatgatctgctgcctatcgaaaatgatgtatacaagtatgagaccagcggcatcggggaggcacgggtgaaggaggtgctcctggacgaggacgacgacctgtggatagcactgcgccacaagcacatcgcagaggtgtcccaggaagtcacccggtctctgaaagatttttcttctagcaagagaatgaatactggagagaagaccaccatgcgggacctgtcccagatgctgaagaagatgcctcagtaccagaaagagctcagcaagtactccacccacctgcaccttgctgaggactgtatgaagcattaccaaggcaccgtagacaaactctgccgagtggagcaggacctggccatgggcacagatgctgagggagagaagatcaaggaccctatgcgagccatcgtccccattctgctggatgccaatgtcagcacttatgacaaaatccgcatcatccttctctacatctttttgaagaatggcatcacggaggaaaacctgaacaaactgatccagcacgcccagatacccccggaggatagtgagatcatcaccaacatggctcacctcggcgtgcccatcgtcaccgattccacgctgcgtcgccggagcaagccggagcggaaggaacgcatcagcgagcagacctaccagctctcacggtggactccgattatcaaggacatcatggaggacactattgaggacaaacttgacaccaaacactacccttatatctctacccgttcctctgcctccttcagcaccaccgccgtcagcgcccgctatgggcactggcataagaacaaggccccaggcgagtaccgcagtggcccccgcctcatcattttcatccttgggggtgtgagcctgaatgagatgcgctgcgcctacgaggtgacccaggccaacggaaagtgggaggtgctgataggatccacacacatcctcaccccacagaaactgctggacacactgaagaaactgaataaaacagatgaagaaataagcagttaaaaaaataagtcgcccctccaaaacacgcccccatcccacagcgctccgcagcttcccaccaccgcccgcctcagttcctttgcgtctgttgcctccccagccctgcacgccctggctggcactgttgccgctgcattctcgtgttcagtgatgccctcttcttgtttgaaacaaaagaaaataatgcattgtgttttttaaaaagagtatcttatacatgtatcctaaaaagagaagctcatgtgcaattggtgcacagcaggagaaatttctggactgttaggatgaatggacgccttctccccgttatttaagatttgtgaccttgtacataaccctgggtgacgtgcacattgcttgggtatggaacggtagaaatttgggtgtttttaaaaccttgtttggggttgttcctgtccttgttgagaatcatagagatgtctgtgttcttggagtatttcacactgaggactaatctgctatcttcattccagtccctacccctcagtgcctgctctcatccaaataacctgggaggtgacaatcaggatatctcaggaggtccaaggtggaacagacctctttgcctttcccagcgtctcatacccccggtagtgcagctgtgggtggaggctggggtgtctgcacgaagtcaggccagcgtcctcctccacagcctgtcactgccccctccccagcctgtgtccacagtgctgtgatcccgagggaagtcctccagtctaagtcacagtgccctgacaggtgagaagcaaactcccgctggaagcctccatctctttggaaaaacagttagtctggagcctgtggcccaggcccttctgtccccaggcatcatcccaacagctcattttccctagtccgccttcgttcaagggtcaggaatggaccagaacagatgggttctggaggcccctgaacagagggctatggctgtggagaaggttcttggcccgttggactcacacagaccctgtaccctctcggcaagcatcttcagtcagattatcctcagtttcagatacttcataataccttgtgttgtgtggggtcatacatcatcgtgtttgtaagagaagatggtcattttattctctgtataaaacttagctctaaagcagaaactaaagcagcaaatgcaggaaggctgtctcgccatcctcaagactcagcagctctcattctccagtggtgagcacaccatttgtgctgctgctgttgtcgtgaaatataataacagtggaagtcacaaaaatgtcccctgcccagccccctcgccgcccttgacctcctgcaggccatgtgtgtattacttgtctagtgatgtcctctcaaagtgctgtacgcgagctcggcgccacctccgcctccctttcagagcctgctccccgccctctctgctcgctgcattgtggtgttctcttctcaaggctttgaaatctccccttgcactgagattagtcgtcagatctctccccgtctccctcccaacttatacgacctgatttccttaggacggaaccgcaggcacctgcgccgggcgtcttactcccgctgcttgttctgtcccctccctcggaccaaacagtgctcatgcttcaggaccttgtttgtcgaagatgttggtttccctttctctgttatttatataaaaataatttatcaaaaggatattttaaaaaagctagtctgtcttgaaacttgtttaccttaaaattatcagaatctcagtgtttgaaagtactgaagcacaaacatatatcatctctgtaccattctgtactaaagcacttgagtctaataaataaagaaatcagcacccct

SEQ ID NO: 6429 - protein, 577 aa, Homo sapiens
MAPIGLKAVVGEKIMHDVIKKVKKKGEWKVLVVDQLSMRMLSSCCKMTDIMTEGITIVEDINKRREPLPSLEAVYLITPSEKSVHSLISDFKDPPTAKYRAAHVFFTDSCPDALFNELVKSRAAKVIKTLTEINIAFLPYESQVYSLDSADSFQSFYSPHKAQMKNPILERLAEQIATLCATLKEYPAVRYRGEYKDNALLAQLIQDKLDAYKADDPTMGEGPDKARSQLLILDRGFDPSSPVLHELTFQAMSYDLLPIENDVYKYETSGIGEARVKEVLLDEDDDLWIALRHKHIAEVSQEVTRSLKDFSSSKRMNTGEKTTMRDLSQMLKKMPQYQKELSKYSTHLHLAEDCMKHYQGTVDKLCRVEQDLAMGTDAEGEKIKDPMRAIVPILLDANVSTYDKIRIILLYIFLKNGITEENLNKLIQHAQIPPEDSEIITNMAHLGVPIVTDSTLRRRSKPERKERISEQTYQLSRWTPIIKDIMEDTIEDKLDTKHYPYISTRSSASFSTTAVSARYGHWHKNKAPGEYRSGPRLIIFILGGVSLNEMRCAYEVTQANGKWEVLIGEWPFRTLAR

SEQ ID NO: 6430 - DNA, 3834 bp, Homo sapiens
  source 1..3834: mol_type = genomic DNA
agtcggtccctagcgcggctgcggggcggagagctgcggctggcccagcgcgcccacctgaggaggcggcggggtccgcaggcgtcgcgggacgaggagatcggagccgggagactcgcgcagcgccatggcccccattggcctcaaagctgttgtcggagagaagattatgcatgatgtgataaagaaggtcaagaagaagggggaatggaaggtgctggtggtggatcagttaagcatgaggatgctgtcctcctgctgcaagatgacagacatcatgaccgagggcataacgattgtggaagatatcaataagcgcagagagccgctccccagcctggaggctgtgtatctcatcactccatccgagaagtccgtccactctctcatcagtgactttaaggacccgccgactgctaaataccgggctgcacacgtcttcttcactgactcttgtccagatgccctgtttaatgaactggtaaaatcccgagcagccaaagtcatcaaaactctgacggaaatcaatattgcatttctcccgtatgaatcccaggtctattccttggactctgctgactctttccaaagcttctacagtccccacaaggctcagatgaagaatcctatactggagcgcctggcagagcagatcgcgaccctttgtgccaccctgaaggagtacccggctgtgcggtatcggggggaatacaaggacaatgccctgctggctcagctaatccaggacaagctcgatgcctataaagctgatgatccaacaatgggggagggcccagacaaggcacgctcccagctcctgatcctggatcgaggctttgaccccagctcccctgtgctccatgaattgacttttcaggctatgagttatgatctgctgcctatcgaaaatgatgtatacaagtatgagaccagcggcatcggggaggcacgggtgaaggaggtgctcctggacgaggacgacgacctgtggatagcactgcgccacaagcacatcgcagaggtgtcccaggaagtcacccggtctctgaaagatttttcttctagcaagagaatgaatactggagagaagaccaccatgcgggacctgtcccagatgctgaagaagatgcctcagtaccagaaagagctcagcaagtactccacccacctgcaccttgctgaggactgtatgaagcattaccaaggcaccgtagacaaactctgccgagtggagcaggacctggccatgggcacagatgctgagggagagaagatcaaggaccctatgcgagccatcgtccccattctgctggatgccaatgtcagcacttatgacaaaatccgcatcatccttctctacatctttttgaagaatggcatcacggaggaaaacctgaacaaactgatccagcacgcccagatacccccggaggatagtgagatcatcaccaacatggctcacctcggcgtgcccatcgtcaccgattccacgctgcgtcgccggagcaagccggagcggaaggaacgcatcagcgagcagacctaccagctctcacggtggactccgattatcaaggacatcatggaggacactattgaggacaaacttgacaccaaacactacccttatatctctacccgttcctctgcctccttcagcaccaccgccgtcagcgcccgctatgggcactggcataagaacaaggccccaggcgagtaccgcagtggcccccgcctcatcattttcatccttgggggtgtgagcctgaatgagatgcgctgcgcctacgaggtgacccaggccaacggaaagtgggaggtgctgataggggaatggcccttcagaaccttggctaggtgacatcagaagctgcttgtgtatgtaaggaaaatggggcttcctcctaaggatccacacacatcctcaccccacagaaactgctggacacactgaagaaactgaataaaacagatgaagaaataagcagttaaaaaaataagtcgcccctccaaaacacgcccccatcccacagcgctccgcagcttcccaccaccgcccgcctcagttcctttgcgtctgttgcctccccagccctgcacgccctggctggcactgttgccgctgcattctcgtgttcagtgatgccctcttcttgtttgaaacaaaagaaaataatgcattgtgttttttaaaaagagtatcttatacatgtatcctaaaaagagaagctcatgtgcaattggtgcacagcaggagaaatttctggactgttaggatgaatggacgccttctccccgttatttaagatttgtgaccttgtacataaccctgggtgacgtgcacattgcttgggtatggaacggtagaaatttgggtgtttttaaaaccttgtttggggttgttcctgtccttgttgagaatcatagagatgtctgtgttcttggagtatttcacactgaggactaatctgctatcttcattccagtccctacccctcagtgcctgctctcatccaaataacctgggaggtgacaatcaggatatctcaggaggtccaaggtggaacagacctctttgcctttcccagcgtctcatacccccggtagtgcagctgtgggtggaggctggggtgtctgcacgaagtcaggccagcgtcctcctccacagcctgtcactgccccctccccagcctgtgtccacagtgctgtgatcccgagggaagtcctccagtctaagtcacagtgccctgacaggtgagaagcaaactcccgctggaagcctccatctctttggaaaaacagttagtctggagcctgtggcccaggcccttctgtccccaggcatcatcccaacagctcattttccctagtccgccttcgttcaagggtcaggaatggaccagaacagatgggttctggaggcccctgaacagagggctatggctgtggagaaggttcttggcccgttggactcacacagaccctgtaccctctcggcaagcatcttcagtcagattatcctcagtttcagatacttcataataccttgtgttgtgtggggtcatacatcatcgtgtttgtaagagaagatggtcattttattctctgtataaaacttagctctaaagcagaaactaaagcagcaaatgcaggaaggctgtctcgccatcctcaagactcagcagctctcattctccagtggtgagcacaccatttgtgctgctgctgttgtcgtgaaatataataacagtggaagtcacaaaaatgtcccctgcccagccccctcgccgcccttgacctcctgcaggccatgtgtgtattacttgtctagtgatgtcctctcaaagtgctgtacgcgagctcggcgccacctccgcctccctttcagagcctgctccccgccctctctgctcgctgcattgtggtgttctcttctcaaggctttgaaatctccccttgcactgagattagtcgtcagatctctccccgtctccctcccaacttatacgacctgatttccttaggacggaaccgcaggcacctgcgccgggcgtcttactcccgctgcttgttctgtcccctccctcggaccaaacagtgctcatgcttcaggaccttgtttgtcgaagatgttggtttccctttctctgttatttatataaaaataatttatcaaaaggatattttaaaaaagctagtctgtcttgaaacttgtttaccttaaaattatcagaatctcagtgtttgaaagtactgaagcacaaacatatatcatctctgtaccattctgtactaaagcacttgagtctaataaataaagaaatcagcacccct

SEQ ID NO: 6431 - protein, 574 aa, Homo sapiens
MAPIGLKAVVGEKIMHDVIKKVKKKGEWKVLVVDQLSMRMLSSCCKMTDIMTEGITIVEDINKRREPLPSLEAVYLITPSEKSVHSLISDFKDPPTAKYRAAHVFFTDSCPDALFNELVKSRAAKVIKTLTEINIAFLPYESQVYSLDSADSFQSFYSPHKAQMKNPILERLAEQIATLCATLKEYPAVRYRGEYKDNALLAQLIQDKLDAYKADDPTMGEGPDKARSQLLILDRGFDPSSPVLHELTFQAMSYDLLPIENDVYKYETSGIGEARVKEVLLDEDDDLWIALRHKHIAEVSQEVTRSLKDFSSSKRMNTGEKTTMRDLSQMLKKMPQYQKELSKYSTHLHLAEDCMKHYQGTVDKLCRVEQDLAMGTDAEGEKIKDPMRAIVPILLDANVSTYDKIRIILLYIFLKNGITEENLNKLIQHAQIPPEDSEIITNMAHLGVPIVTDSTLRRRSKPERKERISEQTYQLSRWTPIIKDIMEDTIEDKLDTKHYPYISTRSSASFSTTAVSARYGHWHKNKAPGEYRSGPRLIIFILGGVSLNEMRCAYEVTQANGKWEVLIVPVEAGS

SEQ ID NO: 6432 - DNA, 2865 bp, Homo sapiens
  source 1..2865: mol_type = genomic DNA
agtcggtccctagcgcggctgcggggcggagagctgcggctggcccagcgcgcccacctgaggaggcggcggggtccgcaggcgtcgcgggacgaggagatcggagccgggagactcgcgcagcgccatggcccccattggcctcaaagctgttgtcggagagaagattatgcatgatgtgataaagaaggtcaagaagaagggggaatggaaggtgctggtggtggatcagttaagcatgaggatgctgtcctcctgctgcaagatgacagacatcatgaccgagggcataacgattgtggaagatatcaataagcgcagagagccgctccccagcctggaggctgtgtatctcatcactccatccgagaagtccgtccactctctcatcagtgactttaaggacccgccgactgctaaataccgggctgcacacgtcttcttcactgactcttgtccagatgccctgtttaatgaactggtaaaatcccgagcagccaaagtcatcaaaactctgacggaaatcaatattgcatttctcccgtatgaatcccaggtctattccttggactctgctgactctttccaaagcttctacagtccccacaaggctcagatgaagaatcctatactggagcgcctggcagagcagatcgcgaccctttgtgccaccctgaaggagtacccggctgtgcggtatcggggggaatacaaggacaatgccctgctggctcagctaatccaggacaagctcgatgcctataaagctgatgatccaacaatgggggagggcccagacaaggcacgctcccagctcctgatcctggatcgaggctttgaccccagctcccctgtgctccatgaattgacttttcaggctatgagttatgatctgctgcctatcgaaaatgatgtatacaagtatgagaccagcggcatcggggaggcacgggtgaaggaggtgctcctggacgaggacgacgacctgtggatagcactgcgccacaagcacatcgcagaggtgtcccaggaagtcacccggtctctgaaagatttttcttctagcaagagaatgaatactggagagaagaccaccatgcgggacctgtcccagatgctgaagaagatgcctcagtaccagaaagagctcagcaagtactccacccacctgcaccttgctgaggactgtatgaagcattaccaaggcaccgtagacaaactctgccgagtggagcaggacctggccatgggcacagatgctgagggagagaagatcaaggaccctatgcgagccatcgtccccattctgctggatgccaatgtcagcacttatgacaaaatccgcatcatccttctctacatctttttgaagaatggcatcacggaggaaaacctgaacaaactgatccagcacgcccagatacccccggaggatagtgagatcatcaccaacatggctcacctcggcgtgcccatcgtcaccgattccacgctgcgtcgccggagcaagccggagcggaaggaacgcatcagcgagcagacctaccagctctcacggtggactccgattatcaaggacatcatggaggacactattgaggacaaacttgacaccaaacactacccttatatctctacccgttcctctgcctccttcagcaccaccgccgtcagcgcccgctatgggcactggcataagaacaaggccccaggcgagtaccgcagtggcccccgcctcatcattttcatccttgggggtgtgagcctgaatgagatgcgctgcgcctacgaggtgacccaggccaacggaaagtgggaggtgctgatagtgcccgtggaggcgggaagctgagcccggctcccaggaagcacagtgagggctcagccattgatgatgatgatgatgatgatgatgatgatgatgatgatggtgatgatgatgatgctgctgctgttgacgatgagtccaagccaagcctggggagaaaagaataaatagtctcataaatttaaaaaagcccaatgctcatcaagaagagaacagataaactgtgtattcacccaatggtgagtttaaagcagttaaaaatgcatgacacacagttgcatatgtcaacatgaatagatctcagacacttaacaatgagtgaaaagagcacattatgggaggacacagacaggatagtgcatttatataaagcttcaatgttgcaggctgaaagagtgagggtcgtgatcaactcagtatcctggaggctacatgggtaaacagcaaactgttctcataaatgcagaatgttggcaaactgacaaactgcatctgccgcccagaaggaatgcggagggcagccactccctaagcgcagttttcttgtgattaggtacatctgaagcctgttagcaataatgtgaacctgtgatcaattaagcagctgaccaatcattacctcctcttccctgctctttctacccagtaaatacaaagggctgtagaagctcagagctgctgcttttgctcagtagaagcagggagtcctcttcttcttcccccgaccccttcttttaaaacagtttcttttaagttttcatttctgcgttcatcctccttcattcagtcccgtagtaaccgtggcaaaccacggcacttcaaaacctcataaaaagcaccacatattgcttatttggatacatatgttgtaaatgtgtgaaaacatgcatgggaatgacaaataccaaagtcaggatagtgactggccatggggaagggatggttattattgtcgtcttatatcttcaattccaaatgagccacgggcttaaaagtacttcattgaataaaaaaaaaccaacaatgtattaatgcaa

SEQ ID NO: 6433 - protein, 567 aa, Homo sapiens
MAPIGLKAVVGEKIMHDVIKKVKKKGEWKVLVVDQLSMRMLSSCCKMTDIMTEGITIVEDINKRREPLPSLEAVYLITPSEKSVHSLISDFKDPPTAKYRAAHVFFTDSCPDALFNELVKSRAAKVIKTLTEINIAFLPYESQVYSLDSADSFQSFYSPHKAQMKNPILERLAEQIATLCATLKEYPAVRYRGEYKDNALLAQLIQDKLDAYKADDPTMGEGPDKARSQLLILDRGFDPSSPVLHELTFQAMSYDLLPIENDVYKEVTRSLKDFSSSKRMNTGEKTTMRDLSQMLKKMPQYQKELSKYSTHLHLAEDCMKHYQGTVDKLCRVEQDLAMGTDAEGEKIKDPMRAIVPILLDANVSTYDKIRIILLYIFLKNGITEENLNKLIQHAQIPPEDSEIITNMAHLGVPIVTDSTLRRRSKPERKERISEQTYQLSRWTPIIKDIMEDTIEDKLDTKHYPYISTRSSASFSTTAVSARYGHWHKNKAPGEYRSGPRLIIFILGGVSLNEMRCAYEVTQANGKWEVLIGSTHILTPTKFLMDLRHPDFRESSRVSFEDQAPTME

SEQ ID NO: 6434 - DNA, 3772 bp, Homo sapiens
  source 1..3772: mol_type = genomic DNA
agtcggtccctagcgcggctgcggggcggagagctgcggctggcccagcgcgcccacctgaggaggcggcggggtccgcaggcgtcgcgggacgaggagatcggagccgggagactcgcgcagcgccatggcccccattggcctcaaagctgttgtcggagagaagattatgcatgatgtgataaagaaggtcaagaagaagggggaatggaaggtgctggtggtggatcagttaagcatgaggatgctgtcctcctgctgcaagatgacagacatcatgaccgagggcataacgattgtggaagatatcaataagcgcagagagccgctccccagcctggaggctgtgtatctcatcactccatccgagaagtccgtccactctctcatcagtgactttaaggacccgccgactgctaaataccgggctgcacacgtcttcttcactgactcttgtccagatgccctgtttaatgaactggtaaaatcccgagcagccaaagtcatcaaaactctgacggaaatcaatattgcatttctcccgtatgaatcccaggtctattccttggactctgctgactctttccaaagcttctacagtccccacaaggctcagatgaagaatcctatactggagcgcctggcagagcagatcgcgaccctttgtgccaccctgaaggagtacccggctgtgcggtatcggggggaatacaaggacaatgccctgctggctcagctaatccaggacaagctcgatgcctataaagctgatgatccaacaatgggggagggcccagacaaggcacgctcccagctcctgatcctggatcgaggctttgaccccagctcccctgtgctccatgaattgacttttcaggctatgagttatgatctgctgcctatcgaaaatgatgtatacaaggaagtcacccggtctctgaaagatttttcttctagcaagagaatgaatactggagagaagaccaccatgcgggacctgtcccagatgctgaagaagatgcctcagtaccagaaagagctcagcaagtactccacccacctgcaccttgctgaggactgtatgaagcattaccaaggcaccgtagacaaactctgccgagtggagcaggacctggccatgggcacagatgctgagggagagaagatcaaggaccctatgcgagccatcgtccccattctgctggatgccaatgtcagcacttatgacaaaatccgcatcatccttctctacatctttttgaagaatggcatcacggaggaaaacctgaacaaactgatccagcacgcccagatacccccggaggatagtgagatcatcaccaacatggctcacctcggcgtgcccatcgtcaccgattccacgctgcgtcgccggagcaagccggagcggaaggaacgcatcagcgagcagacctaccagctctcacggtggactccgattatcaaggacatcatggaggacactattgaggacaaacttgacaccaaacactacccttatatctctacccgttcctctgcctccttcagcaccaccgccgtcagcgcccgctatgggcactggcataagaacaaggccccaggcgagtaccgcagtggcccccgcctcatcattttcatccttgggggtgtgagcctgaatgagatgcgctgcgcctacgaggtgacccaggccaacggaaagtgggaggtgctgataggttctactcacattcttactcccaccaaatttctcatggacctgagacaccccgacttcagggagtcctctagggtatcttttgaggatcaggctccaacaatggagtgagagccaaagaaacaaagatccacacacatcctcaccccacagaaactgctggacacactgaagaaactgaataaaacagatgaagaaataagcagttaaaaaaataagtcgcccctccaaaacacgcccccatcccacagcgctccgcagcttcccaccaccgcccgcctcagttcctttgcgtctgttgcctccccagccctgcacgccctggctggcactgttgccgctgcattctcgtgttcagtgatgccctcttcttgtttgaaacaaaagaaaataatgcattgtgttttttaaaaagagtatcttatacatgtatcctaaaaagagaagctcatgtgcaattggtgcacagcaggagaaatttctggactgttaggatgaatggacgccttctccccgttatttaagatttgtgaccttgtacataaccctgggtgacgtgcacattgcttgggtatggaacggtagaaatttgggtgtttttaaaaccttgtttggggttgttcctgtccttgttgagaatcatagagatgtctgtgttcttggagtatttcacactgaggactaatctgctatcttcattccagtccctacccctcagtgcctgctctcatccaaataacctgggaggtgacaatcaggatatctcaggaggtccaaggtggaacagacctctttgcctttcccagcgtctcatacccccggtagtgcagctgtgggtggaggctggggtgtctgcacgaagtcaggccagcgtcctcctccacagcctgtcactgccccctccccagcctgtgtccacagtgctgtgatcccgagggaagtcctccagtctaagtcacagtgccctgacaggtgagaagcaaactcccgctggaagcctccatctctttggaaaaacagttagtctggagcctgtggcccaggcccttctgtccccaggcatcatcccaacagctcattttccctagtccgccttcgttcaagggtcaggaatggaccagaacagatgggttctggaggcccctgaacagagggctatggctgtggagaaggttcttggcccgttggactcacacagaccctgtaccctctcggcaagcatcttcagtcagattatcctcagtttcagatacttcataataccttgtgttgtgtggggtcatacatcatcgtgtttgtaagagaagatggtcattttattctctgtataaaacttagctctaaagcagaaactaaagcagcaaatgcaggaaggctgtctcgccatcctcaagactcagcagctctcattctccagtggtgagcacaccatttgtgctgctgctgttgtcgtgaaatataataacagtggaagtcacaaaaatgtcccctgcccagccccctcgccgcccttgacctcctgcaggccatgtgtgtattacttgtctagtgatgtcctctcaaagtgctgtacgcgagctcggcgccacctccgcctccctttcagagcctgctccccgccctctctgctcgctgcattgtggtgttctcttctcaaggctttgaaatctccccttgcactgagattagtcgtcagatctctccccgtctccctcccaacttatacgacctgatttccttaggacggaaccgcaggcacctgcgccgggcgtcttactcccgctgcttgttctgtcccctccctcggaccaaacagtgctcatgcttcaggaccttgtttgtcgaagatgttggtttccctttctctgttatttatataaaaataatttatcaaaaggatattttaaaaaagctagtctgtcttgaaacttgtttaccttaaaattatcagaatctcagtgtttgaaagtactgaagcacaaacatatatcatctctgtaccattctgtactaaagcacttgagtctaataaataaagaaatcagcacccct

SEQ ID NO: 6435 - protein, 603 aa, Homo sapiens [sequence omitted]

SEQ ID NO: 6436 - DNA, 3880 bp, Homo sapiens
  source 1..3880: mol_type = genomic DNA
agtcggtccctagcgcggctgcggggcggagagctgcggctggcccagcgcgcccacctgaggaggcggcggggtccgcaggcgtcgcgggacgaggagatcggagccgggagactcgcgcagcgccatggcccccattggcctcaaagctgttgtcggagagaagattatgcatgatgtgataaagaaggtcaagaagaagggggaatggaaggtgctggtggtggatcagttaagcatgaggatgctgtcctcctgctgcaagatgacagacatcatgaccgagggcataacgattgtggaagatatcaataagcgcagagagccgctccccagcctggaggctgtgtatctcatcactccatccgagaagtccgtccactctctcatcagtgactttaaggacccgccgactgctaaataccgggctgcacacgtcttcttcactgactcttgtccagatgccctgtttaatgaactggtaaaatcccgagcagccaaagtcatcaaaactctgacggaaatcaatattgcatttctcccgtatgaatcccaggtctattccttggactctgctgactctttccaaagcttctacagtccccacaaggctcagatgaagaatcctatactggagcgcctggcagagcagatcgcgaccctttgtgccaccctgaaggagtacccggctgtgcggtatcggggggaatacaaggacaatgccctgctggctcagctaatccaggacaagctcgatgcctataaagctgatgatccaacaatgggggagggcccagacaaggcacgctcccagctcctgatcctggatcgaggctttgaccccagctcccctgtgctccatgaattgacttttcaggctatgagttatgatctgctgcctatcgaaaatgatgtatacaagtatgagaccagcggcatcggggaggcacgggtgaaggaggtgctcctggacgaggacgacgacctgtggatagcactgcgccacaagcacatcgcagaggtgtcccaggaagtcacccggtctctgaaagatttttcttctagcaagagaatgaatactggagagaagaccaccatgcgggacctgtcccagatgctgaagaagatgcctcagtaccagaaagagctcagcaagtactccacccacctgcaccttgctgaggactgtatgaagcattaccaaggcaccgtagacaaactctgccgagtggagcaggacctggccatgggcacagatgctgagggagagaagatcaaggaccctatgcgagccatcgtccccattctgctggatgccaatgtcagcacttatgacaaaatccgcatcatccttctctacatctttttgaagaatggcatcacggaggaaaacctgaacaaactgatccagcacgcccagatacccccggaggatagtgagatcatcaccaacatggctcacctcggcgtgcccatcgtcaccgattccacgctgcgtcgccggagcaagccggagcggaaggaacgcatcagcgagcagacctaccagctctcacggtggactccgattatcaaggacatcatggaggacactattgaggacaaacttgacaccaaacactacccttatatctctacccgttcctctgcctccttcagcaccaccgccgtcagcgcccgctatgggcactggcataagaacaaggccccaggcgagtaccgcagtggcccccgcctcatcattttcatccttgggggtgtgagcctgaatgagatgcgctgcgcctacgaggtgacccaggccaacggaaagtgggaggtgctgataggttctactcacattcttactcccaccaaatttctcatggacctgagacaccccgacttcagggagtcctctagggtatcttttgaggatcaggctccaacaatggagtgagagccaaagaaacaaagatccacacacatcctcaccccacagaaactgctggacacactgaagaaactgaataaaacagatgaagaaataagcagttaaaaaaataagtcgcccctccaaaacacgcccccatcccacagcgctccgcagcttcccaccaccgcccgcctcagttcctttgcgtctgttgcctccccagccctgcacgccctggctggcactgttgccgctgcattctcgtgttcagtgatgccctcttcttgtttgaaacaaaagaaaataatgcattgtgttttttaaaaagagtatcttatacatgtatcctaaaaagagaagctcatgtgcaattggtgcacagcaggagaaatttctggactgttaggatgaatggacgccttctccccgttatttaagatttgtgaccttgtacataaccctgggtgacgtgcacattgcttgggtatggaacggtagaaatttgggtgtttttaaaaccttgtttggggttgttcctgtccttgttgagaatcatagagatgtctgtgttcttggagtatttcacactgaggactaatctgctatcttcattccagtccctacccctcagtgcctgctctcatccaaataacctgggaggtgacaatcaggatatctcaggaggtccaaggtggaacagacctctttgcctttcccagcgtctcatacccccggtagtgcagctgtgggtggaggctggggtgtctgcacgaagtcaggccagcgtcctcctccacagcctgtcactgccccctccccagcctgtgtccacagtgctgtgatcccgagggaagtcctccagtctaagtcacagtgccctgacaggtgagaagcaaactcccgctggaagcctccatctctttggaaaaacagttagtctggagcctgtggcccaggcccttctgtccccaggcatcatcccaacagctcattttccctagtccgccttcgttcaagggtcaggaatggaccagaacagatgggttctggaggcccctgaacagagggctatggctgtggagaaggttcttggcccgttggactcacacagaccctgtaccctctcggcaagcatcttcagtcagattatcctcagtttcagatacttcataataccttgtgttgtgtggggtcatacatcatcgtgtttgtaagagaagatggtcattttattctctgtataaaacttagctctaaagcagaaactaaagcagcaaatgcaggaaggctgtctcgccatcctcaagactcagcagctctcattctccagtggtgagcacaccatttgtgctgctgctgttgtcgtgaaatataataacagtggaagtcacaaaaatgtcccctgcccagccccctcgccgcccttgacctcctgcaggccatgtgtgtattacttgtctagtgatgtcctctcaaagtgctgtacgcgagctcggcgccacctccgcctccctttcagagcctgctccccgccctctctgctcgctgcattgtggtgttctcttctcaaggctttgaaatctccccttgcactgagattagtcgtcagatctctccccgtctccctcccaacttatacgacctgatttccttaggacggaaccgcaggcacctgcgccgggcgtcttactcccgctgcttgttctgtcccctccctcggaccaaacagtgctcatgcttcaggaccttgtttgtcgaagatgttggtttccctttctctgttatttatataaaaataatttatcaaaaggatattttaaaaaagctagtctgtcttgaaacttgtttaccttaaaattatcagaatctcagtgtttgaaagtactgaagcacaaacatatatcatctctgtaccattctgtactaaagcacttgagtctaataaataaagaaatcagcacccct

SEQ ID NO: 6437 - DNA, 3754 bp, Homo sapiens
  source 1..3754: mol_type = genomic DNA
agtcggtccctagcgcggctgcggggcggagagctgcggctggcccagcgcgcccacctgaggaggcggcggggtccgcaggcgtcgcgggacgaggagatcggagccgggagactcgcgcagcgccatggcccccattggcctcaaagctgttgtcggagagaagattatgcatgatgtgataaagaaggtcaagaagaagggggaatggaaggtgctggtggtggatcagttaagcatgaggatgctgtcctcctgctgcaagatgacagacatcatgaccgagggcataacgattgtggaagatatcaataagcgcagagagccgctccccagcctggaggctgtgtatctcatcactccatccgagaagtccgtccactctctcatcagtgactttaaggacccgccgactgctaaataccgggctgcacacgtcttcttcactgactcttgtccagatgccctgtttaatgaactggtaaaatcccgagcagccaaagtcatcaaaactctgacggaaatcaatattgcatttctcccgtatgaatcccaggtctattccttggactctgctgactctttccaaagcttctacagtccccacaaggctcagatgaagaatcctatactggagcgcctggcagagcagatcgcgaccctttgtgccaccctgaaggagtacccggctgtgcggtatcggggggaatacaaggacaatgccctgctggctcagctaatccaggacaagctcgatgcctataaagctgatgatccaacaatgggggagggcccagacaaggcacgctcccagctcctgatcctggatcgaggctttgaccccagctcccctgtgctccatgaattgacttttcaggctatgagttatgatctgctgcctatcgaaaatgatgtatacaagtatgagaccagcggcatcggggaggcacgggtgaaggaggtgctcctggacgaggacgacgacctgtggatagcactgcgccacaagcacatcgcagaggtgtcccaggaagtcacccggtctctgaaagatttttcttctagcaagagaatgaatactggagagaagaccaccatgcgggacctgtcccagatgctgaagaagatgcctcagtaccagaaagagctcagcaagtactccacccacctgcaccttgctgaggactgtatgaagcattaccaaggcaccgtagacaaactctgccgagtggagcaggacctggccatgggcacagatgctgagggagagaagatcaaggaccctatgcgagccatcgtccccattctgctggatgccaatgtcagcacttatgacaaaatccgcatcatccttctctacatctttttgaagaatggcatcacggaggaaaacctgaacaaactgatccagcacgcccagatacccccggaggatagtgagatcatcaccaacatggctcacctcggcgtgcccatcgtcaccgattccacgctgcgtcgccggagcaagccggagcggaaggaacgcatcagcgagcagacctaccagctctcacggtggactccgattatcaaggacatcatggaggacactattgaggacaaacttgacaccaaacactacccttatatctctacccgttcctctgcctccttcagcaccaccgccgtcagcgcccgctatgggcactggcataagaacaaggccccaggcgagtaccgcagtggcccccgcctcatcattttcatccttgggggtgtgagcctgaatgagatgcgctgcgcctacgaggtgacccaggccaacggaaagtgggaggtgctgataggatccacacacatcctcaccccacagaaactgctggacacactgaagaaactgaataaaacagatgaagaaataagcagttaaaaaaataagtcgcccctccaaaacacgcccccatcccacagcgctccgcagcttcccaccaccgcccgcctcagttcctttgcgtctgttgcctccccagccctgcacgccctggctggcactgttgccgctgcattctcgtgttcagtgatgccctcttcttgtttgaaacaaaagaaaataatgcattgtgttttttaaaaagagtatcttatacatgtatcctaaaaagagaagctcatgtgcaattggtgcacagcaggagaaatttctggactgttaggatgaatggacgccttctccccgttatttaagatttgtgaccttgtacataaccctgggtgacgtgcacattgcttgggtatggaacggtagaaatttgggtgtttttaaaaccttgtttggggttgttcctgtccttgttgagaatcatagagatgtctgtgttcttggagtatttcacactgaggactaatctgctatcttcattccagtccctacccctcagtgcctgctctcatccaaataacctgggaggtgacaatcaggatatctcaggaggtccaaggtggaacagacctctttgcctttcccagcgtctcatacccccggtagtgcagctgtgggtggaggctggggtgtctgcacgaagtcaggccagcgtcctcctccacagcctgtcactgccccctccccagcctgtgtccacagtgctgtgatcccgagggaagtcctccagtctaagtcacagtgccctgacaggtgagaagcaaactcccgctggaagcctccatctctttggaaaaacagttagtctggagcctgtggcccaggcccttctgtccccaggcatcatcccaacagctcattttccctagtccgccttcgttcaagggtcaggaatggaccagaacagatgggttctggaggcccctgaacagagggctatggctgtggagaaggttcttggcccgttggactcacacagaccctgtaccctctcggcaagcatcttcagtcagattatcctcagtttcagatacttcataataccttgtgttgtgtggggtcatacatcatcgtgtttgtaagagaagatggtcattttattctctgtataaaacttagctctaaagcagaaactaaagcagcaaatgcaggaaggctgtctcgccatcctcaagactcagcagctctcattctccagtggtgagcacaccatttgtgctgctgctgttgtcgtgaaatataataacagtggaagtcacaaaaatgtcccctgcccagccccctcgccgcccttgacctcctgcaggccatgtgtgtattacttgtctagtgatgtcctctcaaagtgctgtacgcgagctcggcgccacctccgcctccctttcagagcctgctccccgccctctctgctcgctgcattgtggtgttctcttctcaaggctttgaaatctccccttgcactgagattagtcgtcagatctctccccgtctccctcccaacttatacgacctgatttccttaggacggaaccgcaggcacctgcgccgggcgtcttactcccgctgcttgttctgtcccctccctcggaccaaacagtgctcatgcttcaggaccttgtttgtcgaagatgttggtttccctttctctgttatttatataaaaataatttatcaaaaggatattttaaaaaagctagtctgtcttgaaacttgtttaccttaaaattatcagaatctcagtgtttgaaagtactgaagcacaaacatatatcatctctgtaccattctgtactaaagcacttgagtctaataaataaagaaatcagcacccct